United States Patent Application Publication US 2025/0130221 A1 - sequence listing, part 7

SEQ ID NO: 461 - DNA, 650936 bp, Homo sapiens
  source 1..650936: mol_type = genomic DNA; note = NW_018654718.1:395131-1046066 CACNA1C [organism=Homo sapiens] [GeneID=775] [chromosome=12]
gtctccctctcgctgcctctgcagaaacagctcctgccagagcggcgctcggcgcggcgcggcgggcccggagcggcggcggcggctcttcctgcctccgcgcccaggagttgccggctccctttgacagcagagagccgggcaggggcctcaggaggactcgctgggagtgggcagaggcgcctcggcccctgccggcccaggcgggccccgcgcgccccccgcccctcctctccgcctcttctcgccctgcctctcccgatttattttttcaaatggtgtagccgccggaggtgcggtgctcagttcttggaaggggcccggatgtactgaggatgcgttacagtttcactcgaggaggcagtagtggaaaggagcagtttttggggtttgatgccataatgggaatcaggtaatcgtcggcggggaagaagaaacgctgcagaccacggcttcctcgaatcttgcgcgaaagccgccggcctcggaggagggattaatccagacccgccggggggtgttttcacatttcttcctcttcgtggctgctcctcctattaaaaccatttttggtccatggtcaatgagaatacgaggatgtacattccagaggaaaaccaccaaggtaaggctggaccccgccgcctcgccggggctccctgccttttccaccgggttcctgccctacccgcgctccccgcggccccggggccggtccctgcggagtggcccggggccgcgtccgcgaggggcgcctccgcctcgtcggagcgcccgggagcccggcgggaccggggcccgaaccgccgcgcgagacggagcggaaaattcccgcccctccccctccgggccccagcttctccagagcatgtgtttcctgtgaaattccaggcgaggggggaaaagttccccaagtggctgccgccgcctcgctttctcgcgtccgcctggagagcccggctgcctggccagccgcgcggggggcagagggcgccggcgccgcggagcccagaggcccggggtccctcgcccggctcggggcgcggctgggagcgcgcgcgcgcgcaccctgcgccggcagagcccggcgcccacggccgcccctggggcgccctcgcgctgcccggcgtccactctcgtccaggcgcccctgccctgggcggcgcgctccaggtggcgggtgggggcggcggtgcagatgtgaagcccagcgcgcccctctggttccccctctgtaggtccccttcttcctctctccctccctcctccgccgctcacctacacccacccacctctccactgctgttgaccccgagcgcgcccacgccgcgtgtgttctcattcgcacccacatgtgggctagcacctgaggatggaagcggcgaggagccgggcggtgtgtgggctttgctgtttcgtgtttgaaggagatcatgaaagggtgtgcctggctcacgcggctccatactattgcccagtgttttccgagcatctccatccttggccgcgagtgtcaccagctccccctgtgatggtgaaaggcagtcaggtaactccctacttcctggaaactttctccctcaccgctctccccccatattaacaagttgttttcttggacgttgcttagcatttaaggttttggggacggggggtgcagacagggtggtccagcggggctttctggcaacctccaggcatgacatctctttcttctcgccactgctctgtctctttgggtgtagtctctcccttttctctcccagttcccagagcctccctgtttgcactcttcctcttctcttcccctgaaagcctatctgtcactgctggtctctgttccttccctgggttcttcccagtgatcctctgaagaccagcctggtggaaggagttgtctccaggtctttttgtccagctttttccctctgtttgctcccagctccaccttttggggacagggccttcactctttagagccagaagctgccatccagcctgcctggtctccatctatcctgaaaccgattttggggccagtcttctctgctttccagcatgggtggcagcttggggattgtggcctcctttggaagaaagaatcttgtcaagggtcatgggttctagggtgagccagagctttggggtcacaagggcagtatccatgtttggatttctctactgttgaccccatccctcacctgatcccctctcccttctgtagctgatgggctagtgaatggtttaggagggaaggagtgagacacaaaagagggtggtatttgtgaagagtggggatgcaagatgactcccctccaggttctgagactgcgtgctttacccacctcctcagtctaagcagcattgaagaggagagctctgtagtattgccctaagtatcactgtcaatggcaatgtactgtggtaataatagtgattattcaccttattcacaggatgataatcttaactagtttacaaggtctcctcttagtgcaggataaaccccttctgaacccatttccttactctggttgttttctttggcccctttgcctctcagcatctccctgctgtatgctgggagcagacattaaaagtaggagtgccaaccccagagaggttcctgagaaaggtagaggggaagggagcaagggagccagcggctgagagctctacctttccagcaacatgccagcaaacgctatggcaacctgaattccagttctctcccttgaagctgcagtgattatataattcatgggagcagttttgcctccatttctagatgcggttcccaggtggaagagcaccaagatccctgtctcccctctactctccatcttctcttctttagttggttggcattgccgaggttgttggggtaggagaggggaggagggtggtggaggtgggaagggcagacctagaacagaatgaatattgacaaggaagaggttgctgtggctaatcactaaagggggcgggtgagccatcataggggttagagtttcaggagacagaagaggagtctaggactgcctcagaagatcagtaatggtgacgaaacaaagagtcgagaaccaaaaaagttgtcagtggcgggggctgtgcattcctctcttcccgacatgctctgagatgtggaatgcaccagtccttgctccctcaccttttccgtggagtgtgtgcatgtgtgagtgtgtgtgagtgtgtgtgtgtgtgtgtgtgtgtgtgtgtgtgtgtgtgtgttgagggtcgaactggagactggaggtcagtgcctgggaacagcctggaagttcattgaaggaccagcttctgaccctgggtttcaggctggggtggcacactcaagccttgcctcgcctctggtgccctgtctgctctgggcctgtgccagcctcccacttttctgggccgattttctattgcaggctccagctagcaaatgagtgtcttaatagtcaaccattgaacaaataaaacaccagaatgtcccttatctgctagagacaaggcagaggggagaaacatgtgtttggggagtgcaagacacactgtgcttttcttttaactacttagcgattcagcagaataagaatcactgtaataaggtaataataataatgatcacagttaactttctttacaaatggtcagagaacaacattgctcgcacatcagcttgagcaggttaaagaaagctgtggcaatagctttgctttttcttgatcctgcatggagaaaactggaggaaaggggctattggagttcatcatattattcctactattggtcaggcactttttagtgttttagaatatgacaatatattaaaaagagtcaatttttcattatttccatagaatacacactaacagtatttaagtgtgtgtgtgtatacatacacacatggaataaggaaaagctattttaaatagatcacacgagaggctaatgcccttcagggacctggggtgttgagagagaagtattgataatgcagtctcctaagactgtttaaagatttcttcttcatagtaaagggagacttgttcttacaggtagatgctgcaggcacagtgctttgtaaatgaaatgatgagccgttagccccgtgggaccatctctcagtcttggcaatgacctaggtctcttcaatttgttcttcaaataaaactgcttgagttgggttcttctgtaagacctatcaaagggatccaaggagcatactgactggagatttcgaggccctgctcatcttgggatccctgcttcctagtacaggccgctgctcagtccagggcctcgatgcaaggctgaacaaataaatgtctgcgtgaatgaatgaatgcgacctggccagacctgcagtagatgtggcttctgcctcttccagtaggtggcgccacagggcttaggagtcaggaaaggggcttcagggtccgcctggtgatgaaaggtgtagggggagtttagagcttgtgacctgttggggctgtgctgcttccatcaggcccacacctgccccggcacaggtaacccaaaagaccagtgtgtctccgtgccgccgcacacactggaggccctcgcggcatcactgagggacccaggtcccacagtgacctctccaccctgttgtaatgagaactcctttggagcccacccagtccgtcgcaggctcttcccacagacgtctgttcccttccagcacagacagcatcccgccgagcctggaggaagccttttgggtgaatcgctgaacttggtatggccagatgttaattttctccctgatttttcactgatggtttagtaaccagagggcccggtggtgcccaagcccagtggagcatggggtgacctgaagcatgggatctgggaacccagacctgtgcagtcacagagcttgccagccaaaggcaggaggacattttcctaactttaatagggaaaagaacacaaaaacaactgggtgcacttcacagttgatttccgtttatgagtctgcctggatctcctgctgggtaatggcagaaaagctcaggagacccaggttaggaagtaactgagatttgttctaatttccagtgatgttttccagcgcctggcattttcttttctattcctttcttcactcggttttcttagttgtgtggcaagttccatgaggtctgagaagcccttggcactgtgctaagaaggggtgagtggctggcagcactttcttccttttacagtaattcctcccgcctgatacagcagctgtttgttctgtaggaggtacaggtcagccggcgtcatctcacctcttccttgctgggaccctgaaatcagtgctgagcattcagatttagcagacaattttattttccaatatggactacagaaagctgatagactgtttgcgaaacacctggagacttaacaacaagcctaattaacaaaataatcacactgatttcatctgtttctagattccatcctcacagttgcctaggttaatgttgggcactgtggaggagaacagaagattggttttaaaaaaaaaggcatggggaattgttttgcaacatatcaggtgccaaatatttagggacagaagtgctaaacattctgataatgaaataacactctgagccatggctgtcattattaaaataatttagtaaacacctgtttacatgtacctcaaggttagataccacgtaaaacaagtaaaagtgacaggatccctcggggaaaatggaatggaatgtttttcggtgtcatttcgaagccgggtgtgtagacttaaactgaacccactgcagaaaaagcaaaatggaaggctgaaataatgaatgccatcatttgaactgaaacctgggcactccagaagagctcttctctgtgttttaattcctagatggggtgcttatttgctcaagaccaggctttcctgagcctgtgtagacacgggcctggagcaggtagacagaccctcttggtttctatagttgaggcacccctggaggcagctgtttatcatggcaggaagggaagtggatgcattctctactgccccctttcccctgccgaattcaggcaggacccgcgcaggtccctggagaaccttgcttcagtgctagctgtgtgtaccgtgtgggcaggaccccagctgggagatggggagcccaggatgaccccacagaaaagcagagctgtgagatggctggagcctccgagagctgagatgcagaaggtgaggggaagccagaggagccccaactccctagggtgtctgggagggtttggggaacaaggtcatcagggtagtcagttactccttgtggagctgaactgaatttaagttgggattgtagggactgtaggagagaagtttgggcctggagctcaggagtcggaccgaggttgaaaatagacccttccttccctggaagccgagggaactagaggaagggttcatctggctgaagcagagggtgaggaaagcgggggttaactggcaagaaacccaaacctctcagcccctcccctccccaaaaccccacagaacagttctctgcaaaacaccttcactttaaaatgggcttcttgtgctataccctgtgtgtatagggggcaaggggctaggctctggttcgttaaagggtttgtcaaacatagaataaatgtaatgtctctttgggaatttactttctaggatcaggacattttatgggtaaaggaaccttagagacaatcctcatttccagttgagaaaacagaggcccctaaaggttcatggaggcagggatgtaactaaatacaaggtcttcagtctcttcatcctcctgcctgtaccacacttggtgctggccccctgagagagcattgttagtgcttctggctaaattttgcttggtagatctttcaacctctctattcttcctccccctgcctccacctttgtactgccttaaaataatttctgcgatgttagatttaggaatggagttggaagggtggggtgggggaaatctatcattggaaaggtttaaaaacactttcttaggctacagagtagaagttcatacatgtccacaagaaactcctgcaaaattcagatcacgattttgtctgcaaacagatctgcctctaagccttttttatttgctcacttcctctcggccccaatctaggcttgtttcagcccctttgcgagagtgggatggggatgggaagccgggctgtgctgtgggacttccctggtgagctgctgggattcttcatggaccagctggcattaccagtagctggggtatagacacacagatcagccccagggtagagactgtgagacaggctgccacagactccacctgagctgggcgaccaagggcgtctttctgctcccatgtcagggttggtctcctaggacccccggcctactcccaggagacattcccagcagtggtggtagactcagcccatggaagagaatcactaggacctgcctctgacattcccatcttccttgaagtgttcattggctgacttgtttcatactctttcaagtcatctctgagaaactggaaggcctctgaggctgactcggtctagcttgaagacggaggcatgagccaggctcatgcttagagatgtggcttttgagttccctggaggaagccatcatttcagaacatagtgttgtgataatttcatgaaatattcaagctgccaatttgccaacaggggtttcttttaatacactcggctacacttggtgttgcccacttgaacctagctaaaaggaaaataaaataatcttgtctcctgtcctttagagaaccaagccaaaatctagacagtgaatgaatgttcttctccatattgcctgtgggcagaaatgttgacttgagtactcaattaagctctatttactttataaccattgtgtcatgtacagtcatttatattcctttctttcttccaaaataatctacgttgggctaaaacctttcaaagacattaacaaaagtaacaaagtaaatagctaaagaataaataaggctgtaggctagagaaatgacttgggtcttgggtcacattctttgacttcatctctttctctgagagttcagaaggaatcaaatccctttttttttttttgtctgtaaagtggagataataatccttagccaattcacttcgcagggcagctgtgaggatccaaataggagaatgagtgtatatcgctgttcaaacatcagctactcttattctccccatcagcgagcagagcaccagagtttggaaaagcaacgccatgaagtaacattcacagcatttcaaacaactttggaggtgttgtgggagggctgacattattcaatattttaaaggtgaaaatgtaaaacaaagagaaaccagagtctgaggtggtctggctgataccagaataatcagggaggaagtgaaccattggttgagatgggcctggtattttgccctccagagagtctaggagcctgtggccagtaggctcccaggacggtggagccatgtgcactgctggcactgctgctgtttccaagctgagggtgaggacatggggatgcagggtatccgacgcctggcagctgtccacctgccatgctgctgtcccctcactgccaccacacatggctgcctggcttcggcctcaagtccaaagccacgctggcctgaagtcctttcatggcctgaaaatagggccattgagggcaggaagaacaccacctgggcaaccaatgtctcctcacttttgaacgtgaattccccaaacctaaacccaacttcccagtacaggaggacgggctggaaaataaaactttgcttcaaaagtaaactttgggtttggaaaataaacttatttatttttcatagccaaaatgttgcaggtttggagatagaggggacagttctgtgtagctccctaagacactgatcaaaataggaaagagctttaacattatagtctaagtgacaggattagttttagtttcccaaagcaaaaataatcccatcatcaaaaagtatgctgggaaactttcgcactttcgcatttgtttgcaccttgttctacccccagctctggtcctgtgatctgtggagccatatatgttttaatttttctctaaagaaaaaaagctgtattgaggtataacatctaccttgttataattttaaaatagagcaagagtaatagccaccatttattgaatgcctagcatgtgttagacaatgttcttggtgcttcatgtgcttaatatgttttatccttacagtaatcctaccacgtgggttttaattatattttttagataaggaaactgaggaccaaagtcttaagcaatgtggccacagccacccagacagtgttggggctgggaattaaattcaggtctgtcggactttcaaaacatttgctctttctgttacttctccccatggagaacagtagaaagagaaacccactatctctctatcctgggaaaatgaccttgtccttgccttctggaacctggcttagatttgccttgtggaagctcagagctggaatccttgttcttacttgatggctgcatgttgtcgtggtaccccgcctcccctcctggtcccgtcctctggctttctttccccttattcccagggtttctgccagggccctccttgcttcttcacatctcctcacaggccttcacagaccacctaggtcagtacaccttgtctcccgggggacccatttgtggcatggccttgcttcaccacccattcttggaatatttcctcagtcactccctccaggaaaatagacactctccattctcaaacgagattcccgtgagtcccggggaccatccctgtaagctgagctctccagacttcatgcattatttatttatttattttgaaatagcagctttgttgaggtataattcgcataccgtaaaatttacccttttgatgtgtatgattcagtggtctacctacttccccaatattttcatcacccgcaaaaaataccctttacccattggtagtcacttttcattcccctctctctccagcccttggcaaccatgaatttacttttgtctctatggattttcatgtgttattgacagcaataataattccttttttttttttttcctgaggtgtagtctcgctctgtcaccaggctggagtgcagtggtacgatctcgtctcactgcaacctccgactccctggttcaagcgattctcctgcctcagtctcctgagtagctgggactacaggcacccaccaccatgcctggcttatttttgtatttttagtagagatgggatttcaccatgttggccaggatggtctccatctcctgacctcttgatccacccgcttggcctcccaaagtgctgggattacaggcgtgaaccactgtgcccagccaacagcaataataattctacagttggagtttgctgtgtagtctgactgttgataacatatctcacaaatttcagacctagataggtcatgacaatttacatgataaatgatgacattgaaaggaagcacgtgaaattagggagctggctgtcatttggaggtgggattaagcgttttctttcaattatacaaaaaagtggttttagcatttttcaaaggtatcttagcataatgtcttcaaggttcatccacgttgtaccatgtgtcaggacttcgttcctttttatggctgaatagtatttcattgaaagcacacgccacattttgcttatccattcttctgttgatggacacttgcgttttcaccttttggctattgtgaatggtgctgcaatgaacaccagtattcaagtatctatttgaatccatttttagttattttgggtttacctaggagtggaattgctggccctgcaatatgactttttagctttaagagcccacttccttgggtagtgccccaaatttgaagcccacgtagatgagactacagcattaggaaatcctattgtgtcagtagtgagggtttggtatttagtctgggctcccagttcctataccagaaatttgactttaattggtgtttcacaatctgacagctgccttttgatgaggagtgactgatactgcctctgttcaaaaaaacaaaatgaaacaaaaacgaaacaaaaaaaaccggtgtctctatatccagttcagctttcacctcgttgctgacctggcttcgtaactcaacaggaaattggtgtttggcaagacaaagctatttagtctgtctctgtctctccctctgcctgtgtgtctagtccaggagcacccatgtctgtggctagagatgtgggcctgataagcctggggactgttgggagagggtggctcccctcatgtgtggctgggccgagtcctccctggactgtgagggggaggcagctctgtgctctgtgctggccaggtgctgcctgccctgccccaggcatgactgattaataagggatctctgccttcagcctgaaagctgccttcagaggggaaaagcagcttcccagggctctcacctgctcctcatacatctaaagtctaggcaagagaggcaaaaacgtgagaagaaaggtaaacagtccggggagaaaattgggaaaggaggaaggggagagggaagcgagcagtgggtagacagccaggggaaacagcagcacgtggtaggctcttggctgtggattgatgccccagttaaatgactctggaagcctctttccagtcttgggataggtattttcttggtgatcattttacctaagagtgataatatcatcggctgcatttctgtcttagcatgttgaactctgctaatctgaggaagaaacacacacatacattgatgcctcagctgaacccattaatcagagacctgggtatggataaaaaagcgcacaggctcatggaggtatgtgaagctcagaagactttgcactttgaaggccaatgtacttaatttaatccaaccgactattagtaaattcctctcctttgggctctgccctcacaccccctcactggccctgctcacaggtgcctctgggccgctgtgcagagctggaatgttgcacagcatttctccaaggtggaagcttctgttgccatatctggctgcctgagacatcctggggattcgagctatacatccaagtggatttcagtgactcagagctcatatttggtctgtcgtgaataggatcttgtgcctctgtttttaaaattatttaaaaggcaaaaattttgacctatgcccagctgtctgaaagaccaggagataagaagccttttctaggataaattgactgtgaaatatctctgaaaatgaactgtctcatgccagttgtgatgaaaacaattctaaatagttttttttcctccagaataggaatggttagtcattaacaaaaagttattgagcgtctgctatctgcaaggcagtttgcttataggatctctggattcaagggtatcttcaaggtacagccctcaactatcccttcctttaagggaagtatctattctaggaggtaagatttatgcctagacacacagacatccgcaactgtaataaaaggcagaacatgcttgatgttacaaggatataaagataaaggctcacagatttaaagaagaagggtggtatggaaagatggaataaatggaggaagtgttatatggaggttgtgactgagccgtcccttgaagggtggatagaaatggggtggagaggagaggcgcacattcccaacagaaagggtgggatggcctgtaatgtattcacagggatgtgcgttggatttcaaaggagtagtgagttgagtttggctggagcaaggttttgcagggggaagaagtgggagagaaagttggaatggcaggaaggggataatgcgtggagcaccctgtattgggctgaagagtttgcatggcatttggtaggcaatggagggccgtttaaagtgtttgagtggagagagggtatactcagagctgctcttccaggcagcaggctagaggataaggtaggggagtcgaggctgcaggtagaggggcagttctgaggctgttgccactgtccaggcaagagagggaaggagtgattttcccagcagaaagccagagacaagggagccctgtgctgtgatctggatgggaagggtagaggttgtatttggaggcaagtagaagatgcccagcatgcacgcagaattagagttctgtctaagaaggtgctatttgaagctgtggaggtggagccattggggagagagagagcagagggaaggaacgatggagagctgaagacagacaggaggagggtaaaatggaggagacaatgacagagtagtcagggaggtagcgggagagccttactactgcagggtcttggggatcaaggcaggagagcatttccaggaggccgtcattgctgaatggagtcgtgaaagggaagatgggaactgagaagcccgctggattgaatgattgggctggagagtgggttcagagtgactgttgtcccgccgaactgtgcaatgatgaggcgtggtggttgtgaagcaggggcagcacatggggaccactctttcaagaattttggctgtgaataaaaggagaggggagggatttgttggcacatgagagattggaaatgcaagagaggggagcagatggggaagaaggcagtaggcagtggcgttggggatgggagtggaaggctcaaccccagcaaaggaggtagcactctgtcttcagaggcagacatgcagtaaagcaggggatgaggaaacgtagaggggcatggggggagctggaaaggaggacaggaggggcctcgggcaggggtgctgaatcctgggagggatgaggcagctggagtggggcctgagcttgaggagaccggaagagggaacggtcagtgggaaacactatgagacacccaaagaaatccacaagggtgcccaggtcccagaggcaccggccgaggtctggaagcatgagttaggggccaggagtgattggcattcctagagaaagcttccccagaaatgaatttggcaaagtgagacagctgctgactaggtctgggggcaaagggttctagctctgtaggaggcgtgccaagctcgagctggtgtgggagaatcaaggtggccagtgggatgcaggagccaggatgcatcgttttagtgggagtcagggagtctgaatcccccagcctgcctccatcccaggtggattagtcatcagaatagccaatgggccccttgagctctgagtggatgcacaaagggccaggtggactttctttggggagcataacaggaagaagatgacaaaagcctgggtggtggagatggtggcagtttaaggatgtgggcttaggactgtggactaggatgcacgtgtgtgtgtgtgtgtgtgtgtgtgtgtgtgtgcgcgcgtgtgcgtgcctgtatgtaagggcaggcacatgaagacagactttattggtttcacagtttggcctccagagggtcttctgggtgctgacaccaaagcagagagagctcgtggtgtgcagccctgaggtcacgtttgtgacgtggatggaaggaagcaggggatgggaggactggtggaggtggacgtcagacaccaggcttcccacagactgtcttgggcatcaaggacaaggaacctgcactgttaacctcagtcagggcgcaacggtagaaaggaggagtgatggggcaatcaagaccacaagtgccaacctcagcgcactcacctggagaatacttaccttcacactgttcccacccctgtctttccatgcccttccatccaaaccaagcccagcttcacagcctatgatattggctctctggagaaccggttagcctttgtggagtgttaagccctgcgattttatatccttataattatatcagaatatcaaattcctgagaacagaacattttgttatttttttcttcatcctctcccctgttgtaatcccacaagaaaaatgttacaaaccactggaaagcctctggttggatcccacttgagctttacaatgccttgatttccctgtaatcaagaaaaatatgatatcctgaatgtttcatgaaaggatgtgagtctttgatgccaaggacagtaacactccttgaatgccatggaaatatgctctgctgagtggctctgagcttacccttggtgtaggaaggtgtgaatgaccagcaggtaccccccagaccctgccccagtccctgtcacatatgcagaggactctggttgggaggggtctggtgtgggggagggttgtgagtggcctggaggcctttcccggaggcaggcagagaggcggtggctgcaaagacctagtgtctctgagttgaggaggctgggcttctgcacctcactcaaattctctgcagcggccagagcccctgcatccattcttatatgttggcattgttcccaaaagaggcacagttgttgacttctcatagatgccaattttcgtgatgtttgcaatactagctcctcatggtaaaatgcatagacagtccagtggccccaagtccttgcctttgttcttccatttttggctagggaagtagcactagtcttctgtgtgccttgcctggaaacagtgtgttatgacggccctcgtgggagttggcatggcaggccctgtggccaccatctcaccccgtctggcctcatctggaaacctacttgcagagtttggccttattctgatgaacctcaagggcagcgctgaccccagcttgatctcttgctgggtctgggcaacaaaaggctttgggatttttccttttttccactccagtgaaacttaggcggaatgcaatgttttcctctgagggtatcagttggggaatgaactcagagtccagatggacagggttccgcagttccagctgctgccatactcagacaactggtcctctgcatttctttggagtttgacttggctttaataaaatgaaggagaaaagaaaattttgaggaagaaaatgaccagaagaagaatgtccttgagttgagggaagccatggaatgggctggtatcctgagaagtggactcagctcttcttcagagacctgtagacatcacagcctgcaatcccatgcgtccttggccctcagactggtacagctagcatccctcctaatgatttttcctgggtctgtctgaaagggtgaggataaaatggcaatcagggtcatcaacttacatctttcaggcccagaaggaaatgaacagaaaagttaaaccaaagacggagccttatggaaagattcctctaacacttgggagccaaaccccaagttatttgacttgcatgtggggggtgtgcctgtacgtgtgtggatgtgcatttgtgtgtgtcagagagaaaataagaagcagaggaggagagagcagtgtgaccgagcttgtaacccctgaaagacagcatgtggtcacaagatacagccatatctgggagcaggaatttatgttttagatgtattgttatctgtcacattggcattttgttcgaaccatttaattttcccatgtctaggattctgcatctgaccttcctaccatatgaatctatttattcttgtaacctcacttataatgaccgttacttgagtatttcaaagggattgatggaaatatggcaggagaaaactttgtgtctggtcctttacgtactattggctgcattgggacattatagcatagactcaaatgcttaaagagtcttttcttttctttttttcttgagacggcgtcactctgttgtccaggctggagtgcagtcatgtgataatggctcacggcagcctcaaattcctggactcaagcaatcctcctgagtagctgggactacaagtgtctgccaccatgcctggatacattttaaattttttgtagaggcagggtctcactgtcttttccaggcttgtttcaaactcctggcctcaagtgatcttcccgccttggcctcccaaaatgctggcattataggcttgagccaccatgcccagccttaaagagcatttctgagctaaatttgcattaagaaagaatgtcttgggggtcgagcgggaagagtataaaagagccttgctccatgacttcaaaaatagtaccagagacaaaggactttgggtcttaaaggaatgaggatgtcccatgtttgcctggccttgcatatgaaactactgagagagtcttaaatcggggatgctttatcttacttgtggtaggtgtgactaagaagtcacacccattttcaagaaagtctttgagaggaagctttattgcatcttgcattccttttcttctttctgagtttctttcctagtactgaagcatatattttttagttctttcagcaatggtctatgagtggtaaacttcctcagtctttgtctgaaattttcttttattccttttggcttctcattctagaatgatagtttagtcaggtacaggattctgtgttagcagttatctttcttcagcagtttaaagatattccattatcttctggattctattgttgctgatgagaagtctgctgtcagtctaaatgaataatcaatattctaatttttgaaaagatatattagtgttacgcagttttacaatgatgtgttaattacatagattaaaatatattgctgggagttggtgagatacttcaacttgaagattcgtatcactcaccagttcttagtcattatctctttctttctttcccttcctttctttttttttctttctttctctcttcctttttctttctttattttctttctttcccttccttccttccttccttttctctctccttccttcctccttccttccctttcccctttccccttccctccctccctccctgcctgcctgccttccttccttctctctctccttccttccttctctttctccttccttccttcctccttccttccctttccccttcccttcctccctccctcccttccttccttccttctctttctccttccttcctccttccttccctttccccttcccccttcccgcttccccctcctccctccctccctccctccctccctccctccctgcctgcctgcctgcctgcctgcctgcctgcctgccttcctccttccctttgcttccctttcctttgacagggtctcactctgttgcccaggcttgagcacagtgagtacttggctcactgcagccttgacctcccaggctcaagcaatccttccacctcagcctcctgagtagctgggactggagatgtgcggcaccatgcccaactaattgtttcatttttagtagagatgagatgaggtcttgctatgttgccgaggctgatcttgaactcctaagctccagtgatgataccacctcagcttcttaaagtgctgggattataggcatgagctactaccgctcccagcctcacgatcttttcaaatattatctctcccctagtcactctattttgttcctctggaactctattattaaaacatgtattgatctttctcattttactctttcttttaaatgttctttcatattccatattttgttatctatcctctgctacactctggataatttcttctgctttgctttccagttcaccagtttccccctcatttgtatctgctgcttagcctttaaatgcatttgcaatttcaatgacattttattcctggaagttctactttttcaaatattttagttttttcatagagtatctttttccctttataatttccattgtgaatgatttcacaatatgtgcgtgaattctccattccttggtgctctgagcatggcctgccatactgccagaactggaaatttgaacctgtgttttatagtccactaataatactttactaccatcacaaggatgttgtgaagacaaatgagataatggatgtggacatgctttgaaagtattcgtatatttaccggaaaggggttataataaatatacctctgcttggcttgttaaataattctctcttgaatcagacatttaataaaactgtatttgtaaggggaaactcttcaaatgtatgcaacaagattatatatatacaaatatatatatatacaaaaaatatatatatatttggaaacagagtctcgctgtgtcacccaggctggagtgcagtgatgctatcttggctcactgcaacctccacgttccgggttcaagcagttctcctgccccagcctcctgagtagctgggactacaggcacacgccaccgtgcctggctaatttttttgtattttagtagagacggggtttcactgtgttgccctggctggtctcaaactcctgaggtcaggcaatccgcccgcctcggcctcccagagtgctaggattataggtatgagccactgcacccagcctgacaagataatatttaatagcttacctcctttattgcctcctattcatggcacctaatgatttctagtctgttcgatggaacttacttatttacagagtgttttaaactttcaagatgttagtccatggtttctccttttcaatgttttggtatataatttggtatatgaggtatatatcagatctacattaaaatatatttttggtacattaggtatctattaggtaaattaggttaggtgtattgggtatatgtcaggtatattaggctaactcattctactaccttcatttagggaaccgaagacagggcagactgtcagtcaacaatcaatcaatccatgttaaatgtgtgctcactgtgagcttggcactgtaatagccattggcagagggcataaacaagcataaccaattttgacagccatgtattaagtgtctactagataccagacggacacagtgatagatacgttgatgaataaaacagatgggcatctgctgtgctagagcggacagtggggccgctggctggaagtgcatcacacattctcagtggcggcaacacggaccattgttaaaccacactcgtttgagaagtgagtgaatctttcagctctcaaagtcttgctctgttttccatggagctccagtgcacaggcagataccctggctccatcaaggaccaagtgtttaaaaaaacgtggtccaacagatcagcagcttttggtataagggggtcaaatacaggatgaaacatgatattttgtgaggttgagtggctatctctatgtcactgaagtttgtctttggttgtcaccttacccttctgtgcccttccattgctgtggaacattctcacttcaccctcagggatctagggcttctcccttgtatctctccttccctctgctgaaacatgaccacagagaaagggcccttgctgcactgttcttgctcatcctggcaatgcagtgctggctgtgtcttggaggagctgggctggccctccaggccaactttgccaggagacagcacaggtgggaggagaacggtctttaggatgtagctgaaagccccacaggagcagagccacctggaacctgctcagagggcggctggaatcaactatttacatttttgtataaatttaagtcattttgtcttccctctgaagtatttgcatgttcagccttttctctaattgtgaaatgaaagactgtctcctttccaagaatttcaggcatcagcaaataagttcaggaggaattagtaagatggaaatcatcctgtggatgattttgcccagcctatgacttccagttaaatccggcaaaggagaaatctaagatgacaaataggtttcagatcctgtgtggatccaggactggttatggccacctggagtgctctgttgaaaggaccctgaaccattgcctaagctcctaggggaaagtgttcagtgatggattagtgatgtctgccataggcctaggcaggagtgaaggtaagcggcaccactgcaattctggccattcctcatagagtcagagagttgcttaggttgtattttatacagcaagttgattcaatcattgccatcaaacaaatacccaattcagtgaaaaaaaaatcagttgaagtatgtgttaggataatgtagataatgtaggaaaaaacatctgcccattaaaaattatattcttccctttttattcagctaggttggtaaatcatagacatatttttaaaggtgaattaatttgagagcttctaatttctgttctagactcctgaaggagtctgcaaataatactttatagttttactgcaccttcattctaaggatttttcaaaacatctcatgcatgttgtctcattgcattgtttacttgaccccatgacagatttgtttccagcatacaggtggggaaactgaggctcggagatgatctgacttgccgaaagttgaatggcaagtctgagcaggtgcaggcttggccctgctcttcttcctttgtaccatgaacttgttgcgactcctctggggtctcctctgggagatggaaatttccatccagggagtactgttattgataggccctctcagggggaggagactgccagtgccgtgactcaaaatagctgtctcttccctgctgaagatgttgccctttccgcagcaaatggatgaattagacccccctgcttcgataaaatactttagggtttatagggtggaaaattttgtttggaaatgaaaatagcccatagccatccataccctgaagctgtcagctaatgccatctgagtcacccctccccatcttctggcacctgtggggagcctccctgtggtctaccttgcggggtctgagcttggccatatttggcattctggagcctgctggctttggaagtgcctttcaacctgccaacacccacatggggacccggatcaagccatgtgtttaaatgactgggctgtggagggagctccagtggagacgtccaagggatgtagggccatttacttaacataaatcagttccctgagtgtgagtgtcttaatgcattccttcagttataaacagtttagagccatgacagccaacatcttttcacccccgctctccttagcccaggcctccatttggatttgtttctacagccagagactttgatgattgcaagggatgatagggaggccattctgaagacaaataaccattgtttatggagccctgactcctggggtggcagccgctcactgggtgcaggcatgggacctgctcatcagctcctggtgggcactaatctaagtgtgtcccatactctatcttgtttaatcttcccctcccattgatgaagtggggacctcttacattttacactttagagaaaattttacatttatggaaacccattttacagagaagaaacctgacgttcccagggcctcattaatttgctcaaggtcacacagctattgaatgggagagctggaatttgaacgtaggcagcttgttttctgagctctggcttctaaaacgctttgccatgtttatgttatttcctgtctaatttggaggctttgttgctgggcttttgagatctttcttgcttgcttaaatagcagtccataggttggcagaacaagcctgtggatactgccctgacctccggtaggaatgttcacagaagtggcgtcagtaccatggacttgtccttgtcccaacctcagatgtagaacagtggagccaggttcccagagtcctggcttgtgctgtgccccaggtttctcctgggagcggatgtgccagggcttgttcttgggagtctgcctgcacccatggagaactgacagtcagggaacccattttggtataaacaggggttggtatatttagaaataatctctagagactgtcatatgtgcttatctgcatgctcagagataaaagtcagggaggtgggtcagtaagaaaatgctggggttgacatccagttgacacatggctctttcccagggacacagggcagcctgatacatagggcctattttagggtctttcattatcggtttggaattgtcgctgtctgcactgcagtaaaacaagactcgcctggatctgcctttcctgacttgagaaaaaaagatccttacacaggcttgccttcgattcccatctttctccaacgtgctcacatgtgctagggttttttgttttctctctgcaacccacccgcagacgtaaccttctgattcactgtctaatttagggcagaaacttgcagagcaatgtcaaatgggtctgttttcacttctggatattacacatgcgtaatgttcttgctttgaaagcattccaagaggatacgataaataaaggggctcgtacacatacagctcagtggccacgtggctcacatgggtctgctgcttttgggagcgggccatgtttcttctccccttccttccctcgcctcactccctccctacctacctcccccctcccttcctcccttcacttttccccctcctttcttcctttgttaagcaaaataattttttcattcatgagcaaaaacagttttccaagggatgtgaaaaggcaacagagatggtatctctagtaccctgtatttttcagtcacaaaattatttgcctctggcttttttcccaagttcgattcccatttattctacacttgtatcggaaccattgctgtttttaatgggatgacacagttaaaatgagcccctgctttatagaatgggacttgttagacgggtcaccctggttggaaggcccgggagacctctggctctttaaacacgcagttgctgtgtgtgaaggacactgggttctgctatacggcactttctactgagtgggaaattgagacatggaacatgaaccagccacccctggaatccaggagagggctgaagcactggctggcacgtgccctggagcggacgccatgctgggctcactagctgtggcttcatgtttagcaatgaggtcgagcaacattcattacaacgcattgcccacttaagtttgatttaagatgtgtaccgtttatgatcaacagggaaatttaatttaggtacagctaatagctgcatgtgtgagtatgtgtgtggtaggttgatgagagtttcaggcatgttgtttaaatttgaacattagctaaccttctaggtaagtgtttcataatggggtatcccacatataaaaatgacattagggttcagactttgcaattgattgcacatctctcttttctaaatgttttcttctgtctttttcaagagaaaggggagatcttaatgtatgggtagtccaaggtacataatgttttatatcacagttttaaatttgtattactttttaaagaggaagatgaagtagtagtattggctagactgggttgagttgggatttgcaagtaaaaatagccttactttattgagtatctagtgtatgccaggccttatgtcaggaactttatgtgacttgtataacttaattctcacaacaaccctgtgttgtagatatgagtgtgaacaaaggagagaataggttcaaaatagctaatgccatggcagcccatagaagtttggagctggatatagggtttggggctgaggaggcaagagttacggcctcaggcctataaaaattgggggagctggaatggaacccttgcataaagcccagaaccttaaagagcttcctgttcagagaagggagatgagaaactctgtttactgctttggagtcaacagcaaggaagtgttctgtgtgtcctggggcttgctgtgtcacctttgagagagcaaaactctcgggctgtatcaaccacatgtgtggcacctgaattcatactacttgcatactataggaaatttaggataacaattaacataaaaatgaaatctaagacattgatagattaatggataaagaaaatgtggtgtatacatactgctgtggactgaatagtgtgtggaagcaaattcatgtgtggaagccctagcctccaatgtgatggtatttggggatagggcctttgggagttgattaggttcagatgaggccaggaggtgggccttcctgatgggattagtgcccttagaagaagaaacaccagagagcttgctctcactttctccctgccacgtgaggacacagagagaaggtggccatctgcaagccaaaaggagagccctcactagaaatccatctgctggcaccttgatcttggagttccagcctctagaactgtgaggaaataaatttttgtttcttaagccggctagtctatggtattttgctatgacagcctgagctgattaagatacatacagcggagtattattcagcctgaaaaaaagaaagaaatcctgtcatatgctacaacggggatgaaccttgaggacgttgtgctaagtgaaataagctggtcacagaaggatgaatactgcatgatcctatttatatgaggtatctaaagtagtcaaactcttagaagtagaattgtggttgccaagggctgaacgaggggtgcagagggggttgttcaatggatatagagtttcagttacacaagatgaaaaagttctagagatctgatcacaacaatgcacatatagttaacactagtttaactgtacacctaaaaacgcttatcgtggaagtcggtgtggcgattcctcagggatctagaactagaaataccatttgacccagccatcccattactgggtatatacccaaaggattataaatcatgctgctataaagacacatgcacacgtatgtttattgcggcactattcacaatagcaaagacttggaaccaacccaaatgtccaataatgatagactggaataagaaaatgtggcacatatacaccatggaatactatgcagccataaaaaatgatgagttcatgtcctttgtagggacatggatgaagctggaaaccatcattctcagcaaactatcacaaggacaaaaaaccaaacgccacatgttctcacttataggtgggaattgaacaatgagaacacatggacacaagaaggggtacatcacacaccaggggctgttgtggggtggggggaggggggagggatagcattaggagatatacctaatattaaatgaagagttaatgggtgcagcacaccaacatggcacatgtatacatatgtgacaaacctgcacgttgtgcacatgtaccctaaaacttaaaatataataataattaaaaaaaaatagttaagatggttgtcttagtcagtttggctgccataacaatttaccatagactgggtggcttaaacagcaagtactcatttctcacaattctggaggctgggaagtccaagatcatggtgctagcagatttgatatctggtgaggacctgcttcctggatgactgccttctcattgtctcctcactggcagagagttgagaactgaagagctctctcatggctctttctataagggcacgaatcccactcatgaggaaccatctttatgacctaattacctccagaaggccgcacctcctcataccatcacactgggagtccagtgcttcaacatataaattttggggagacacaaacatttagtccataacaatggtaaattttatatatatatttttgcctcaataacaagaaccccacaaaactagatctaggataactgatacccataggacccttcaaaaataatcacaaaaactctgaagccttcttccacagctcaggacccttcagacttttataaaataagcagtccaggctgaagatgagcttacagtaaaaaataatgtacacctcacaacagagttgaggaagagtcagcagatataacaaacagaattactaccttgaaaactgaagtcacaggacaatttgaggagaatataaaataaccttgtttaggctgggtgtggtggctcacacctgtaatcccaacactttgggaggctgaggcgggcagatcacttgaggccaggagttcaagaccagcctggccaacatggtgaaaccttgtctctactaaaaataacaaaaattatctgggcatggtggcacacacctatagtcccagctccctgggaggctgaggcaggagaatgttttgaacccaggaggcagaggttacagtgagctgagattgtgccactgcactccagactggatgacagagtgagaccctgtctcaaacaaaaaacaaaaacaaaaaaaacaaataaaataaccttgtttaaatcaaagagatggccgggcgtggtggcccatgcctgtaattccagcactttgagaagctgaggcgggtggatcacgaggtcaggagattgaggccatcctggctaacatggtgaaaccccatctctactaaaaatacaaaaaattagctggacatggtggcaggcgcctgtaatcccagctacttgggaggctgaggcaggagaatggcatgaacccgggaggcggagcttgcagtgagccaagatcgcgccactgcactccagcatgggcaacagagtgagactctgtctcaaaaaaaaaaacaaaaaacaaagagataaaggaagaaatagaaagcataataaaataatagtgctatatgaaaaaggagaagatttttaaaaagggcccaactgtatttttagaaatgaaaaacacatttaaataaataacttaatggatggattaaacattaggttagatatggtagaaggtaatatcagtggattggaagttagatctgaggaaattgcatagaatacagcccagatattaaaatattgcatatatgaaggagccattgaaagaattggtggaaagaatgaaaaaggttaacttacatctaaatggagttctaggaaacagtggagagaatgatgaaaaggcattactttaaaggataatgccaagaatgttttgaaatttaagaaagatattgatttttagattataccagcacactgagtattgagtagggtaattaaaaatacatctcgatctagacactcagtgtagaaaactgcttaaatgtcaaagaaaatcttaaaagcaagcagggagaaaagacagattatttctgtacaaacaccagacttcatcaaccacaacagacgccagaagacaatgaaataatatcttcaaagtgctcagtgaatatcaaactagaattctatacaaagctaaattatcattcaagagttaggatggaaagacatttttcggccaggtgcggtggctcacgcctgtaatcccaacactctgggaggctgaggtgggtggatcatgaggtcaggagatctagaccatcctggctaacacagtgaaaccccgtctctactaaaaaatacaaaaaattagccgagcatattggcgggcgcctgtagtccccgctactcgggaggctgaggcaggagaatggcgtgaacccgggaggtggagcttgcagtgagccgagatcgcgccactgcactccagcctgggcgacagagcgagactcagtctcaaaaaaaaaaaaaagacatttttcctataaacaaaggctgagagtatttacctctaaagtgatctgtgctgagagaactaccaagggacatgcttaataaagaagcattaattttttcatgaacctggcattgcaaatgtattttttttaagaagattaagatttaggatgattgaaatttaggatggggtgggtgcaaagatcagaatttaatgtgttctaaggtcttggtatttttcagggaaataatgaactattatttgaaatatttcataattcaaaagaaagcagacagaaatacccagacattgacctttgggcaccatcattatcactagaataacaactaatatatgcggagttcttactgtgtgccaaggtcttttatgatgttattccatttaatctcacagcaaccgtatgaaaaaggtaacgctgccattttgagaggtaagaaaacaggggggacaggggggatattcacttcagtgctgccatcactgagggtaacacacagcaatagtctgtgttccgtgaatgtggatgaaccaaaccaagctgaggttaaactataataagcaccttgctcgtgtcacatgttagagaagtgatgaaactgtggttctaactcaggcctgtctagcctgagactccctgctcttttccacagtgtctgcccctcactgtttccttctctgagtagacgagtcagacgctggccctgcacttcctgtgaattaatgccccgcttttcccctctcacacatgctttggtctgtgtgacttgtcccattcaggccctgatgtcctagtggtgtctttccaggtgtcatacagcccggcagcgtctcctgcatccttgctttgctttcaacaagactgggccggctgtcgctccccagtttctatgtggcagtcagacaacaccccccgcatggtgttgctaggaaatgcaggagcgatcatagcatttggagcaggggccctctctcctgcctcctgtacacacctgcctttaccatctgttcaggatgctcctggcaccttgaccctgccacactgagatgctccacctcattctagactgtggacctcagagcttgggttttcttaatggaggaattatcagggagaaaactggagcctggggttgctaagctacactggaccctgttctagtcacacactggagaagaggtgctgagagtgggatgtcttgcgttcaaggaattttcattcagtttcctatattttcaacaaaacgcctatctctgctcaagtctactttatatcgtatatttatatatagatatgcacacacatatgtgtacatacacacactgaataattaactcgttacgcctgtgaaaatagttttttggtggtgtttgttttttgcccctttggttcgtttaatcatggactgtgctgtttggtttcctgaattgccagttaatttcaggctaaggcagttaatcaggtagtcccacatggcctggcttgaacatagaaggaacagggagctctgatgcatttaggttctgattactggcttctcacacactgtcatcattctttggagggtttttcttgacctgagctcaaatcattccataccaaagggattcctgatttaaactgtcagtgttaaaaggcctggtggacagatggtgtcttacaggcaaacaaaggctcttggcttgctgctgatggaagccatggactcctccaatttctccttttcccccaaagaggccctggccgtagatcccagcattgccaggcagcctgtgttgttgaggactgtgtcctgtgttttggtggccaagagcatttcgactctcccaggggtgtgccagaggatcaggctatccctttcttagggacacagttgaggtgggtggaaacagcatgtaccttgccattggagaagctgggtttatgctgtgattcacccagccatctcaggttgtgctcttgggagagtctttgatcctcagtttccccagctgtagattggtgatatttgtctccacattgtaaagagaatttatgatactgaagaaaatgctgtgtaaactttaaaacaatacaaatgtaaggcattgctactctcagtgcttggaggatgttttgtgggaagttaatggcccttgctctgccatatttcagtgccaagaaccacaagagctgtcaataaatactgatgaatgatgagggggagaagccatttgactctgtggaagccagtgctttatatattaaatgcatgtattcattggatcattcattgagcaaatatttattgagttcctactaaacacgaggcactgggaataaaacactgaataaaacaagtggaatcatgactaatgtttcctctggctttcacagagttagaaaaattaggtgtgttgttttcataaaattaaattattctatatatataaaggattttaaaatgctgatagtatatctgtcctcctctttggtattaaaatgtctcttcttttgtgtgatgatggtgatagttgatttttgaaaaacttttcacatagtcaaatttgaaaaggtgttgttagttgtccttgaaatccagcttggggatgactgatctagcccaactccccacccagggcaggcctgtctttagcattctcaacaagtggtcatctagtttctacttggatagttccagggaaggggacctcactaacttcaacacgcagccattcaaatgttaaacagccattatcttttgagtgttcttttttatattaagtggaaatctaccatcctataacttctgctcatcaagcttgagtcctccatctggagcaaacaaaatatatttacttcattttcttatagccctccagatttttgaagcagactattatgtttcttccaagcatattttccagacttcttgtccccactttctttacccacgttctcccgtggcttcattcctctccctcttgccccacctctgctggtcagcttctacttgccagtgttcctcttgcagtctgttccccagaagggacacagggcttcagctgtgtgccgacttggatggagtgctcagcctgctatgtccctgattcagagctctgaatgcagattaaggaagaagtaaagattgcgtttgcctttttggcagctgtgctctactgttgactcatattgagtcgtagcctactaaaatccctagggtccttgtcatataaattgctgataaggcaagccagggttccacctaccctatgtttatgcagtgaattttttcatctaagtatagtcctttacattgtgcttattctatttcatctcgttagtgtggaccatagtttcagcttgttgaggtcatttttattctgactgaaacttccaatttactagctattcctcccagatttgtgtcagcagcacatttggcaaatttgtcttcatccaactttttaatttagtgttcaaaaggctagagccaaagacagagccttgggtcacatcagtagagacctcccagggtaaatgtatcagtgagtcaatccctaggcatctgtgcatagaatcagtgcacctatgaatgtgtcaatcatcagtgcatctctggatcagccaactgcagaccctcctgagtgtattaatcacactggtgatgtgagttctattttcagactcttctacttctcattttttaaggcaatgtcaaccttttccattattgaaccaccattggtaggattatgactttcaaatttaccttttcagcccagatatctgtctcttttacatttttaattttttaattgaatagctgcagaatgttttaatttttcaaagtaaatgcactatctccacgtcctctgaaaccttcttctctttctgtgatcaacttggtgccaccaagttggccaagccaggtacctggaagccattctcagtgcttttgctttcttctcactccacagctaattcaattgagtggggtaattataaatacccttagctgttctaagagattctacctccttaatacctcataatacacccctcggactctgatccgtcttgcctatacaactgtaagaaccttctaactagattctgtactcctggcctgactccttctagccctcatcctgtactgtgtcaccaggaaacaaaagcctcactcagattatgtcagtgtactgcactgaggcctttgctagcaccctgtccactgtaaatgataggtggtcctgcatcgtcttactgttctcagcttttactgtttcttctaccaaccctacacttcagatgtactgtctactgctggttcccaactgcagcatgtaaattcatgctttggatatgccgttccctgtacctgggatgcctttcactccttctagtcaactgacttctactgcttctttaggattcagatcaagcatcccctcctttgggacttcttccgcagatgcagcgggttgggcatcccttttcagcaccactgcagcactctaagtgtacccattggaaaactcatcactacatggtagactgtttgtctgcctctcccacttggtggagggcccttgcagggcaatgcctgtgctctgtttaccactggagccacagctcttagcacatagtagtaggcacttgggatttgttgaaaaaatggatgaatggaggatttgacaaatcatttccaatttgccttgaactgagtgaccattacttcccttttagcattactctatgattctgcatctgtggcatccctttgatgtactggccatataattccattcaaaaagtgaaagtgtacttgacattgattaggttttttctccatatatgttccaagtcatccgatttctaatctattctaggcttgttaaactccatttttaccacttagttgcatgtttgtttctctgatcctgtattagttagggaaggctagcagctgttacaagcagcccaaaatctcactggcttgatgcaatacgagtttaattttcagttacgtgacagtccagtgcagttactcctggtcaggtggccttccacatggtgactcagtgagcatggtccatttcattctgcagggcttctctctttgtggtctttgacgttttctccattcagctaatgtatggagaaagagaagcaattgcaggtgaggaaacagagggatggtgcgtgggagcttctcactggcccggcctggactagcacaccatcacttctgtgcacatttcactggccagaacttagtcatatggtcatgtctgactgccacggcagctggaaaatgtaggctagctgtgaccccaggaagaaaaagggaacacagatatttgtgagcatgaacagttgccattgcacccattcttagattctggacctcgtgattcccagggctgccttccagagctcttcttagtcagggcattttctgtgctccaagccctttgatcttctatctcccaggctgggtttttttatctctgccctttgcctctctgttctctcaagccctcttggccattggtacctcatttctcttttcttgctggcctgtctgatcttgactcctcatcgctccagtttcccagcagctgatcctcacttgctcacgtgtctgggactggaccatctgattcttggtacctgcttgccattgccagatgtgttcctcagggacagcccatcccattccaagtcctggcacaatgggggagagtcctttcactctgtcctgtgctttgaagtccttcctatgagtacagagtatggatttgaactctgtttttagagataattagagaactgagggagttacagtgagagccactgggagatgtgggctttgggaagccaaaagtatccatgctgtatgtcctgaagcagataagcctgaagttaatggataatctgtacgtatatgtagaaaaattgcaaaggtggtgatgctagagtacatgtttttttgttactctgaaaaagaagaaagtgtcacattttagtgtgagaattttaggtaagagacaaagaaaaaaatcataaattccagaatttgggatgccattatggagaggttaagtaatgtgctttcctagaaaaaaatgggagtggaagagcccatctcagaaggctttgcagtgacctgctgggtggcaggagatggataagcaagctcaaaatctcttcttctgccatgattctttgaaaaaaataaaaaagctgggtgttctgcttttgactctgaccttgtttgagagatgctcatactgaacgtgtttgtctctgggtaatggttccggatgattttgtaaatggaacgggtattgtcttgtaaggtttcaggaactatgatgcctgagttccattacctgttttgtcacccactcattctgcaggttactcacttgggtaggccacttctccattcttttgatggtctgcttatctattaagtgggaatgggaacaggatgaattttcaggaggtttgaatgagaagtaattcatgtttctaacacgcttcagaatacataagtacaacatcctatgggaattcaaaatacaattacacttttgttaggtttatttctccgtatgctggttctttggttcttgccttgagacatgcagctttttgcaaatgctgtttcctagaaatagctctttaaatgtgtgtgcctctcctagtgagggctgaaatggtaccctctgctgggttggaggctggggaggaaggagaggaggctgaaagtcaacaccctcaggccagggccctaactctagaggccgtgaacacggtggttagagcacgtactttgctgtcaggctgcttggtttgccggaggcttggcacaagctggttagtccctctgtgcctcagtgttctcatctgtgaagtgggcgtcataataatgcctaccttatgggggtgctgagaggattaaataaatcaatgtatgtaaaatcatgagaacagggtctggcccacagggagtactctgcaagtattaactcttatttttaaacaggtattttagaaagatgctttgcctcagatgcgttctccttggttacttgctgacgaaacaacctcctcccatgtatctgaagggcctcagagcagccttcgtgcttgcagacatgcggagaaggaccttcccactgtcctcgggtgggctcagcttacgttaagagatgaccatcaacacacggggaaagcaatttttcagttcataggatttagtcggactggttactatatgtcactgcagcgtggagggaatatcagaggactccactgcattaggcgggctgggcacttgcttgccgttgatattcttaaatgaatcacgttgttaaatgcggagggagggctgtgcgcgcagacctatattcttacttctgggagaccctgtggggctctgagactttgcacttcttagtccaaccaacttgaagtggtcccttgctcccagtgattcattctgcttttactgctgattctgtgctcttgagggattcatggttcgtgcacacgtggaagggtggggcagtgggtaaaggagtgacattgcatgagtgtatagacaatagctgcactgtgtcacttacagcctgggcttcttccgtaagccctaaaccacccctgtctgtccccccgaccctgaggtaagccattgatgtgggggcgagtggtagactaagcatccctttggaagaaaaggattaatttgcatgaagctaggaacacacttttgaaatattaaatacaacagaggtctgctgagcacctcctatgtgtaaagcaccatgctggacgccgtgcgaggtacttggagtagtaagacttgactcctgtcctcaacgagctcaagatctcttgggggagacaaacacaggaataaaacaggttgtgatgaacatggcaacagagcgtggtgacaggatgccataagaatcttggggctctgccgggcccatccggggcatgttatgtacccagagacttgacattttttaatttttaaaaactgtggtaaaaagtacgtaacacagttttcaatctgaatcatttttaagtgttacagttcagtagtgttaaatatattgttgtggaacacatctccagaactttttcatcttgaaaaattgtaactggctgggcgcggtggctgacacctgtaatcccagcacttggggaggctgaggtgggcggatcacaaggtcgggagatcgagaccagcctggccaacatagtgaaacccctactaaaaatacaaaaaattagccgggcgtggtggcaggcgcctgtagtcccagctacttgggaggctgaggcaggagaatggcgtgaacccgggaggcggaggttgcggtgagctgcgatcatgccattgcactccagcctgggtgacagtgtgagactccgtctcaaaggaaaaaaaagaaatgaaaaattgtaactacacacccattaaacaactccccatttctccctgcctccagcccctggcaaccaccattctactctctgtttttatgcatttgactactttagatacctgatgttaaagtggaatcattgaatatttgtcctttgtgactggtttatttcacgtagcataatggactgaaagttcatctgtcttacagtgtgtgtcagaatttcattgcttttaaaggctgaataatagtccattttatggatagactactttttttttttttttttttttttttgagatggagtcttgctctgtcacccaggctggagtgcagtggcatgatctcggctcactgcaacctcggtctcccaggttcaaatgattctcctgcctcagcctcctgagtagctgggattacaggtgtgcactaccctgcctggctaatttttgtattcttagtagagacagggtttcaccatgttggccaggctggtcttgaactcctgacctcaagtgatctgctcgccttggcctcccaaagtgctgggattacaggcatgagccaccgtgcccagccacggatagattatattttgtttgtccattcttctgtcaatggacatttggacttgttattgtgaatagtactgctatgaacctgggcatgcaaatatctcttggaaatcctgctttgagttcttttggatacatatccagaagtaggattgctggatcatgtagtagttctatttttaattttctgaggaatcgccatacagttttccacggtggctgctccattttactttcccgccaacagtgcttaacgttcttattcctccacatcctcgctggctcttgttaatttctattttttgatagcagccatcctaatgggtgtgaagtgatagctcatggtggtttggatttgtgtttctctgatgatcagtgatgttggccatgtgtatatcatcttggagaaatagctattcaagtcttttgcccattttaacatcaatactcgaggatttctctttctgctctgcccatatcctcagatatcgggactggcttgcttctgcagagggggccagatcaaccctgcaccagcagaggcatagggcagcaggggcttctccctctgcaagtcccaaaagtatgcgggttacttgtccccattggccatataactagcacccctctggactgcttagctctgcccatcctgctgtttctaccttgcgatgatttacatggatgagaggctgggtatgttcatttcttcttgcttcagtattaatacattaccacagacttagtggcttaaaacaacacagttttattatcttatatttttgaaggtcagatgtctaaaatgggtctgcagggctgcaatacttctggaggcacttggaagactgtttccttaccttttccagctctagagaatgcccacattccttggctcatggccctctcctctacctgcaaagagaacaatgtagcatcttttgctctcctctcgtgccttcctcttccgaggacccttgtgatgacctcagacccacatggataatcccatctcaacatccttaacttaatcacattggcaaagtttcttttgccacataaggtaacttattcacaagtaccagggatgaggacaaggacgtgtctgggggtgatggtcattattcagcccacactgggcctctgctatgtggaaggcaggggtaagagcatcttttgtagggagggttcttattctgtgccttctggacttaaactttaccctgggttagtaggaacagcatctagggatctgaaggcttgggcttgactttggtttggctttgcctgggtgggaacctaggggacaagaggcttgctttctctgagctcctgtgacctcaccttttaaaggaggtgggtgggccaggtgctctttaggtccctctcgctctgccatatcctcacctgctctcatttctcatgtggtgtcctcacattgccttttcccattggctatggagagactgaggctgccctgaagggtagaagaggaaagttatatgaaactttggggaaatggctcctgggcaccagctaattcaaaggaggacaggaatagcaggaatgaagggcgcgaaggcactgctttattgcccgcctccttcccccagcccctacataaagcatccttggaacaaacaaatggaaatactgcacaccctgtaagcctaattgggtcatacataacttgtacagtgatttcctatgaaacttcaattagccccctcttccagttcaaacctgataagctcaaatatttgtaaactgccagccagatggaagatgtgtctccttgtggcttggatatcctgtaactcaatatgtgtggtgactggcatgggcatccgtattcaaggaagggaaggagcctcgcaccctggacgtggcattgaggggcaagaaaaggtgttgtttgttctctttgggacaggtggcccgactctcctctggagcaggctgggagaagttgccaaggacagttggcgtccttcagtggctggggaaggagagggtgactcttgggtccttgtgtcattcttcatcacttccaactcaagggagaatgttgacttgaaatagttaacctttagtaagcatgcattagtattaatgcaccctatttaatccttattatattatccctgttttaccgataagaaagctggggatcaaagaggttaagttaacttagcaaagatcacatggtcaacaagtggagagctgagactcaaatggaaatgagtctcatgtctaattaaatgtcgaatttcaaaatgcatctctttctactatgccacatcatatcttctggcctcttcccttcacctaaaaccattgcccttgggagtggaatgtggagctgtgaatgaaggaggaggcagtgagccacagcctggaggaggtgacggctgcaaaccccgcactctggcagaggccagtcaaccgctttggaatgccaggctgcctggagctaactgtgggccaatcttgtgttggccactttcgtttcaggcccaaatttagttacagagtcagaaagagcaaggcccctggcagggcaaagttaccagagagtgtacgtgggtatgtgtctgtgtgggtgactatgcagtggggcctctccttcccagggaggctagtggcttcttgtggcagggtagtatcttacacagccgtgcctcccactcccctgtaccagtggagcccctggtaggcctgcaccctgatgcttcttgaccacttgtcctatgctaggcattgtgaggccacatagtggaatgagacaggactctgctctcagggttatgttggagcaggaggagaagttacatggatataagaaaggcagtgaccaaggccatgagctgcacagatggaagtgggtatgctttgtgcctccgtgttccacgctggcaacatgtgttcgtacctgtactcgtgtacctgcgtgcatgtactcaagggtgactgtggggtcatgtgggggacttgcctcctgagccccttaccctgggcaggtggtggctgctcctttccctcatcgcggagcactttacacaactgtatgatcatgggtgatctggggcccatgggggcagcttcgtaactctttggctcaactgggaagttggagcaggtatttgctaccctgagtgtgagccctaagaccatagttttatgctggaaaccgcccctctttcatgacactcagtgcctagtgcctgcagttgcaggctgccaggggaccacccaataacaaagctatgttgaggccatctgtgtttcgtgctgaaaggacatttttcttcagcagcatactgagtgcatagagcagaccaaagcagacatcccattttccccagtaacctccgcatgtgtgaaaactgggcagctgtcaccttgagaaagatgctgctgggtcaccccaaagattccacatacatgctgttgggtgcctccttgtatgtgtgtagctgttattagccccatttcacaggtgggaaaggcaaaggcaggaaggctgccaaagagcctggtattcaagggaaatgaatgagcaggcagttgtaatctcagtggcatcccactccacaatctgaagtgcatccccaagggttagggagagcagcttaagaaaccagcagacatttcagaagctgagccctatggacagtgcacatcccatgctcaaggagttccggtggtcctagcccattagccacgtttgttgagactcagcggagcacccccagtaagtggctgccctattcaggagtacttttcagattcaagtctttatcaatattaagggaggaaattcaggggtggaggtgggcgagcaggggcctcctctcttttgggaagcctatttctttggccagcatgtcctgaatgataaacttctccagcacccactagtgaattgcagaatcactgaatgccagaaaagtgcataggaccttagaggtcatttggtgaacaccctcagtttacagatgaggtgactgaagcacagagagggagataaacttgtctagagtcacacagctgcttagtgggaaagggaggaagagactcatgcattcagccccactcaaaaaagtgactcaagagggagagccgaccaggaagtgggagtggctgggactgtctgtgcttcaggggaaatgttgggggttgtgaaatgcagccactctggatggggccatgctggggtgcctacaagggccttccaggtgctcagcccttcctgtgcctctccttcattgctgcaggccccaggggctcaaccccctttaacaataacaaaatgagaccatttaatgactacttccccctgagaacttagtcgatggctgcaccatgctaagtgcttataaatgtttcaagactcttgtcacaactcagagatatctaagtctcagaaacgtaaataagttgcccgggctcacagggctagtaaatggcaatacagacgggaacttagggctcctgcttttgctgttaaccaccagatcacactatctcttcttggaggtggctgctgtaattcactcaatgtgcttgcagtcctgtccccataaaactcagtatttctagatcctgcactcccacctgtccactttttctttcctgtcttcatagaccagaagcaggtccaatttgtcttaaaggttatgaccctcctaattcctgtggggacacagacagaggagaggaacagagatagggggacagagtcacagagatgatcgagtgttacagcgtttttacagctctaggttctgctctgtgaatcctgactccattctgagatgaaaaatggtagtgccattgacttctgccttctgctttcgggttcttaaagatggacttctcctgacctccccttcttctcccttttggcccagactttcagtgcagttgaggctgcgggagaatccgggcagcactgtaagtgccctcggcccgagtcaggccatccagtgtttcgccagtccttcaaggaccctggaggagaagggctaggcagggtcggataccactggctccagagagtgtcagaaaaacctaagcagaaagaagagaagggggagtgcaggacataggaagatggcaaacagacgcccacagaagaggagagtgcatgcatcctatgaggacggagcgtggatttatgatgccagagaaactggaaggtttaggagtggagaggtcagtcttagcctgggtcccactggatggaggctgtgtgcttctctctgccttggtttcatcattcaccatcattgggaataatgtcttttgtctccttacttaaagtgatcaggcactgagttgaaatcagcattccttcagcaaacacttcttttcatactggctgtgtgccaggctctgggctaggcacagagccacagagatgagcacgtcatggcctgccctggagatactcacaggtgcccagagtggagcttttggacaggactgaaactgtgcagagatgaggggttgatctaacttcccatcaaaccagctctcgcagccagaggtccgatgcctgatttttaacggcgcttgagaaaactgttgatatatttgaaggtgagtctggttttactcagttgtgaaggcatgtttgtgcatgtgcacatatgatttatttgatatttgaaaacaatttatgaccagaattctttgcatccttctctgggcctatgtcatgtgctgagggcttgccggaagcacttgtatagggtagagacttgtcctgccacatatctctcctctggactggcctaaagtctatcctcccatctccttcctgaaggacagcttccaaatgccttcccctctggttcttttcctgaggacagacctctttctctttcctcttgggatgttcttccaagtattctgagtctctttggctttttaaaacacattaaattgaggtaactttttgttatggtaaaatatatgcaacataaaaattatcattttaaccattttaagtgtacaatttagtggcattaagtacgttcaccatgttgtataaccatcaagcactatctgtctctagaactttttgtcattccaaaccaaaactttataaccattaactcccattttctcttcctccccagccctggcaaactctattctactttctctctttacaactattctaggtacctcatataagtagaattattcaatacatgttcttgtgtgtatggcttacttcactcagcaccatgtcctcaaggctcatccatgttgtagcctgtagcagtattgtattctttttaaggctgaataatactccattgtatggatagaccacactatgtttgcccatccatttgttgacggacacttgggttgtttctatcttttgtctctttggataatgctgctatggacatgggtgtacaagtatctgttcaagtcctcgccttcaattcttttgggtatatacccagaaatggaattgctggttcatatggtaattttatgtttaatttttaaatttttatttatttatttttttgagatggagtcttgctctgtcacccaggctggagtgcagtggcgcgatctcggctcactgcaagctccgcctcccaggttcacaccattctcctgcctcagcctcccgtgtagctgggactacaggcgcctgccaccacgcccagctaatttttttgtatttttagtagagacggggtttcaccatgttagccaggatagtctcgatctcctgaccttgtgatccgcccgcctcgacctcccaaagtgctgggattacagatgtgagccaccgcgcctggccacatttaatttttttgaggaactttcatcctgttttccatagcggttgcaccattttacattccccaccagcaacacatgaagtttccaatttttccacatgattgccaatacttgttattttctgattttttcgataatagccgtcctaaggggtttgaagagccatctctggctttgaggatttccatgtaaattacagtgagccgccggggctctctgtgtggctgttcctagctgggggccccttgggttgagcttgccctgtaagcacaggtagattggaggcagccgctcagcatagctgagtgtgctctcaggccacctctgcagctgggagagcccagccatgggcagagcggggtggctgctgggctgcacctggttcagcccctgctttgagatcagtaggggaggagatccaggcaccagacaactgggagtgggggatgaggccggctggagaggctgaggggagcagtgagatgtctggaccaatgagttctagaacctgagctgtctgaactagaaggacctcgtacggtatctggtggagcctcctcattctatggaagagattgagagccagagaaggaacgtgatttgtctgagtgcgcagagcaaatgagtgatgggcctggggctggaattcagatttactgacttctggcctagttcttttcccaccgaacttggggaggagtcaagataacttcatgtctatatgaagtttgatatttaccaaggaatgacagcctcaggggagacttgcatattttttcgttgccttctaccttcttgtctgcctgctgtctggtggggttttgtagggattaatcagataaatagctttgacttttctaaatgaaagaagcattgtattttatacaaagcattgttattaaacggcctgtgagtgtgtagaaataagctgatgctgtttcttttgtcgtgccttagtgagaattagagacttccaggagtggcacaaataggctgtgtgtgggtacatttgtgtatgtaatgtttttagtgtgtacatatgcagggtgacccaccttccccatacagtgcgatcccctgacaatggaagaatttcagagccttttactaatagaggatccttgaggaatgcagcaccattttcaaggatctctggaattctgtgttctgaattatctggagagatccattaatatctgtgtatgggatatagcgattgtttttaagagttggttgcttaacatggaaaatgtgcttctgggaaaaagagttttaaaaacccagctttcatgttttattttacttcattgaaatgaggttcttcttgcgtgccccgaggctttatctctggaatgatttttactaaataattcttcatattcaggtagtactttcatagacataatcccttgtagtcttcaccattgttctgtgaggggtgtggtatcatctcagttttacagatggggacattgaggcgtggagagcatgtgtcacttggcactggtagcactgctcaccgtgtgaggggcggccgtagagctagggcctgcttgctgaagccacgtggctgtgtggctggggaagccctccctccctggaacctggttctgaggttatgtgcatggtgcactctggaccggggcttagtctcgctgccgctcactctgggcgcatagccctgctcatgcttcatggaggcgagcagataggaaacagaatggtttttaaacaagacgaaaagaaaaaggaaaagatgaagagaaaaaggaaaggatcttgcccatgtttctcagctaattttcaaaccaaccgtcttactgtgttactttaccctgaacctagatccttctgcagagaaccacagttggaaacccaggagtgcaagtggccctctgtccagagcttaggctggagttgagacggctgccgagaggtgtgctgagttcttatgggacttcttgcttctttctctgtggctgcagggagctgcctctgtttgcctgcagtgctggggatgaggaggaagtggcctcaggcaggttgggaggcaggcggcctgtctgtccccttccagaggcaggaatctggcactggggtggccacagtcatattggaagtatacttaagcaacaaaaccaaactgtaacttggttttctttctgattaccaaataattacttattgcacagaattttggaaaattaatcacaaaaatacctagtaccatttattatatattgtattttctcttactgtggccacgccagtgccagattcttgcccagccacggacagtcccactctggaagggggcagacacgctgcctgcctgccaacctgcctgaggccgcttccccattacccccagcaccacagggaaacacaggcagctccttgcagctctgtcctgagagtgtgatgttcattaactcatttgattgtcacacagtgctatgagataggcagtgttattatctgctttttacaagtgaggaagctgaggcacagagaggctaggtaccttttcaagtctcacagctagcaactgacagaggctcgaatttggatccattctgcctggtttccaggtccatgcccctgagtgccaggctgtactgcctctcagcacgtgtatattacctgacacttaaaaataacactagtgtttccttctagtatttcttctatgaaaacaaacataaaattggatgggggccgggtgcagtggctcacacctgtaatcctagcacttttggaggctgaggtgggtggatcacctgaggtcaggacttcgagaccagcctggccaacatggcaaaatcccatctctagtaaaaatacaaaaattagctgggtgtggtggcacgtgcctgtaatcccagctacttgggaggctgaggaaggaattccttgaaggaggttcaaggaattgcttgaacccgggaggcagaagatgcagtgagccaagattgcaccactacactccagcctgggagacagagcgagactccatctcaaaaaaaaaaaaacaaaaaaaaaaaacaacaaaaattggatgggagcctgatgcaggaggatcacttgagcctaggggttcaggactggcctgggcaacatagccctgtttctaccaaaaaaaaaaaaaaaaaaaaaaaaattagctgggcacggtgactcatgcctgtagtcccagctacttgggaggctaaggtgggaggattgcttgagcccagggaggttgaggctgcagtgagctgtgatcacggcactgcattccagcctgagtgacagaacgagactgtctcaaaaaaagaaaaaaaggtcgggggcagtggctcatacctgtaatcctagcactttgggaggccaaggtggatggattgcttgagcccaggagttggagaccagcctgggcaacagggtgtctctactaaaaacaaaacaaaaatctgaggtaggaggatcacctgagtctgggggagtcgtggctgcagtgagccgtgattctgccactgcagtctagcctgggcgacaagggtgagacccatctcaaaaaaaaaaaaaaaagaaaaaagaaaaaaaattgtggtcccattgtatatacttttgtggaccctgtttttgcttaatattagactgtggaaacaatttctgtattatttcatatttttcaaaatgtaattttcatggcttcctaaaatgctgtcagtggatgtgcattgatttctctaaccatttctccagtgacgggcttctaggttgtcttcaatttggtactggtatcattcacaccgtgacgagtacccaggcgcagagctttgccagactcttggattagttctctcagggtagctcctgagaagggtggtgaatgttggaatttcttaacaactcccaccagagtgctgaactgctgtcctgacagggtggagcagaccacgcttcccccgggcaaagtgcaggaggctctaggaggggttaggggctcaacctccccctcccaggtggggctgtgggagctacagctccatcgtcgtcctcaccgtgcagaacagaaatgcacgctccgcctccctgagtgtcaggcctgtgggtccgtgagctccgagcctcaggagtaggggcagcctctgctgcagggaccactgtgccatcccactgagtcccgtgacccacgaggctgggtgttcagaggcacgaggtggagtgcgagcaggtcctgccggttcccaagggtgcccgcccagttcagtgggtgacagtgaatgcgcagggtgagtgaggattagctgagggagccattctctcggatggtggcagaaggaggctggggccaccgagaatactaaaaactgccctcacaaggtcgctgcctcctgtgttctagttctgctgcctgggaaagctgtactcaccctctgcctctgccctcctaccaataaactgggccagagcaacagaacccctgcatcatgggaccaaagtccaagtaattactattatggggaaaaaagccttgggacagttacgttttgagtcatccttttattcaacacattggtagtgtgcacataccacactccaggctgccctgggctctgagaatacagtggtgcaaaacaaaggctcatgcttcctgggacttccctcctgttgggaacaagaaacacatattcatttaaccaatgataatagatacattgaacatatggcaaacatactaatttaaaataacggaagagcatcttccccgtatacttctgcacggaaacctttgaaggccaaattaaagttctgtaaaagaacttccatgcagccaatgtgttttgagtgcctcctggcaacactgtactaggatttgaggccacagtgctgtttcctgctctcaaggagcttgtgagttgctgggaaaataagagaaggacccaagtattagactttaactcatctcaggcgttcagcagctgaaggaaaggggaggctgagccagtgtctgggtcccctcagtgtggtacctggctctggggcattcttccccactgtctgcacaccctcccttctccccagacatcagcaacctgaaggatttctcctttttgtagatggctgtctgtcctcaggcaggcagattattttttattttttttaattacacttaaattctggggtacatgtgcagaatgtgcttgtttgttacataggtatagacatgccgtggtggtttgcttcgcccatcaacccatcatctacatttgtatttctcctaatgctatccctcccctatccccgtactccccgaaaggccctggtgtatgatgttccttaccctgtgtccatgtgttctcattgttcaactggccacgtatgagtgagaacacacagtgtttggttttctgttcttgcactagtttgctgagaatgatgttttccagcatcatccatgtccctgcaaaggacatgaactcatccttttttatggctgcatagtattccatggcatatatgtgccacattttctttatccagtctatcattgatgggcatttgggttggttccaagtctttgctattgtgaacggtgccgcagtaaacatatgtgtgcatgtgtgtttatagtagaatgatttataatcctttggctatatacccagtaatgggattgctgggtcaaatggtatttctagttctagttccttgaggaatcgccacactgtcttccacaatggttgaactaatttacactctcaccaacagtgtaaaagtgttcctatttctccacatcctttccagcatctgttgtttcctgagtttttaatgataaccattctaactggcatgagatggtacctcattgtggttttgatttgcatttctttaatgaccagtgatgatgagctttttttatatagttgcctgcataaatgtcttcttttgagaagtgtctgttcatatcctttacctagtttttgatgggatttttttttcttgtaaatctgtttaagttctttgtagattctggatattagcgctttgtcagatgagtagattgtaaaaattttcttccattctgtaggttgcctgttcactcagatgataatttcttttggtgtgcagaagctcttcagtttaatcagatcccatttgtctattctggcttttgttgccattgcttttggtgttttagtcatgaagtctttgcccatgccaatgtccttaatggtattgcctaggttttcttctagggtttttacggttttaggtcttaagtttaagtctttaatccatcttaagttaatttttgtataaggtataaggaagggatccagtttcagctttccgcatatggctagccaatatttccaacaccatttattaaatagggaatcctttccccattgcttgtttttgtcagatttgtgaaagatcagatggttgtagatgtgtggcattatttctgagggcctctgttctgttccattggtctatatatctgttttggtaccagtaccatgccgttttggttactgtagccttgtagatagtttgaagtcaggtagcgtgatgcccccagctttgctctttctgcttaggattgtcttggctatgcgggctcttttttggttccatatgaaatttaaagtagttttttccaattctgtgaggaaagtcaacggtagcttgataaggatagcattatatctataaattactttgggcagtatggccattttgatattgattcttcctatctatgagcatggaatgttttcccatttgtttgtgtcctctcttatttccttgaacagtggtttgtagttctccttgaagaggtccttcacatcccttgtaagttgtattcctaggtattttattctctttgttgcagttgtgaatgggagttcactcatgatttggctgtctgtccgttattggtgtataggaatgcttgtgatttttgcacattgattttgtatcctgagactttgctgaagttgcttatcagcttaaggagatttggggctgagacaatggagttttctaaatatataatcatgttatctgcaaacagagacaatttgacttcctctgtttgtatttgaataccctttatttctttctcttgcctgattgccctggccagaacttccaatactatgttgaataggagtggtgagagagggcatccttgtcttgtgccagctttcaaagggaatgcttccagtttttgcccattccgtaatctctgctgccacactaaaaaagttgaaatgctgatttttcaataaatgtgaattaatccttaactagggcctgtaatttagatttgctatcaccaggtgctgataggcgccttagttcaagtagcaagaggtcttgacttccttcctctccatgcttggaaataagtggaggaagcatttggttattatggcaaaaattatggcaatttgtcatcttcagttgaaggccgtggcttagctgtgtgtctgtcagtttgttttcttccctatggtctctgatgtcaatatgagagccctcgagtgccaagggcgttatatcagggtcctctcaccgaagcagtgttggccttgtggtcatcgcaggtggtttgcttccaggcgttccttacgaggcttccttttcctttctttaccttctttcagccagctgccccataaataacagagagcaagtgtggtttactggatcactagcaggtgtgaatgctgtagcttttccgcttttcccattggcttgggcctctgaagtgctccaggctctttgccttctccagccttcatgtagtcatcagaggcaggtgggttgtaggacagaaaagatacagttgtatttgagggagtactcgtcagttgggttggggagagagccgcagatctcctggcgccctcacggtctccttgttttggagcacatttgactgctgtggtcatggggcctgttctgggcaccccacctctcatgaactgtgtctgtagcaggatgggggagaggaggaccggcagagtgacagaatgctgctggaaatggtgtgaaaatagctcaggtaggaggaagcgcagtcagatgcggcatggcggcgggcgcatcgggaaaccactgggcgcccaccccggggagggtttccacctcagctgggcgtcctgaagccactgggtgcccaccccggggagggtttccacctcagctgggcatcctgaagccactgggcgcccaccccggggagggtttccacctcagctgggcatcgtgaagccactgggcgcccaccccggggagggtttccacctcagctgggcgtcctgaagccactgggcgcccaccccggggagggtttccacctcagctgggcatcctgaagccactgggcgcccaccctggggagggtttccacctcagctgggcatcgtgaagccactgggcgcccaccccggggagggtttccacctcagctgggcgtcctgaagccactgggcgcccaccccggggagggtttccacctcagctggggcgtcctgaagccactgggcgcccaccccggggagggtttccacctcagctggggcgtcctgaagccactgggcgcccaccctggagaaggtttccacctcagctgggcgtcctgaagccactgggcgcccaccctggagagggtttccacctgagctgggcgtcctgaagccactgggcgcccaccctggagagagtttccacctcagctgggcgtcctgaagccactgggtgcccaccccggagagggtttccacctgagctgggcgtcctgaagccactgggcgcccaccccggggaggatttctacctcatctggggcgtcctgaagccactgggcacccaccccggggagggtttccacctcagctgggcatcgtgaagccactgggcgcccaccccggggagggtttccacctgagctgggcgtcctgaagccactgggcgcccaccctggggagggtttccacctcagctggggtgtcctgaagccactgggagcccaccccggggagggtttccacctcagctgggtgtcctgaagccactgggcgcccaccctggagagggtttccacctcagctgggcatcctgaagccactgggtgctcaccctggagagggtttccacctcagctgggcatcctgaagccactgggcgcccaccccggggagggtttccacctcagctggggcgtcctgaagccactgggcgcccaccccggggagggtttccacctcagctgggcgtcctgaagccactgggtgctcaccctggagagggtttccacctcagctgggcgtcctgaagccactgggtgctcaccccggggagggtttccacctcagctgggcgtcctgaagccactgggcgcccaccctggagagggtttccacctcagctgggcatcctgaagccactgggcgcccaccccggggagggtttccacctcagctggggcgtcctgaagccactgggcgcccaccccggggagggtttccacctcagctggggtgtcctgaagccactgggtgcccaccccggggaggttttccacctcagctggggtgtcctgaaaccactgggtgctcaccccagggagggtttccacttcagctggggtgtcctgaagccactgggtgcccaccccggggagggtttccacctcagctggggtgtcctgaagccactgggtgctcaccctggagagggtttccacctcagctggggtgtcctgaagccgctgggcgtccttaagccactgggcgcccaccctggagagagtttccacctcagctgggcgtcctgaagccactgggtgctcaccctggagagggtttccacctcagctggggtgtgctgaaaccactgggcgcccaccccggggagggtttccacctcagctgggcgtcctgaagccactgggtgctcaccctggagagggtttccacctcagctggggtgtgctgaaaccactgggcgcccaccccggggagggtttccacctcagctgggcgtcctgaagccactgggtgctcaccctggagagggtttccacctcagctggggtgtcctgaggatttctctcgcttaggctggaggggaatgccagcttccccatttggccattgagaagaaagtcatctctcatttatgtgatgaaaatattagacactgaaaaaggacttttggtttctacattgttttttgggtcttagactctcttatgctttgaaaatatgtctttttgcatagggtggttaattcttgatcagaaaatccacccacccatcaacatctgaattcattcgctattgcctttttaaaaagttttcccacaattttgaattcagtgctctgctcgttatcttccccacttctcacatttctttgtcaccatgctcttcccacaaggactttgtcttaatacagcacaacctgtgttgcccagtgtgggcgcctctagccacatgtgactatctgaatgtaccgtaattgaaaattaagtaaaatgcaaaatgcattttgtcagacgtgctagctacatttcaggtgctcaggagctgcgtatgactggtagcaagggctccgtaatccagcctaggattatagagcatttctattactgtaaatgttgtattggacagtgttgctatagactggtctatatatctcagtcagggttcaggcctataacagaaacttctgtagccgtgtttagaggaaagatagtacaggaatttaggggcttatacaataattggaaatgctgcaagagcaggctttaggccgggtctgtgggaatgattcccaaaacagtgctgcagaacaggccccccgagggaactgcggttcgggtacaattatgaggctgggggacctggaagccactgtgccaagggctggctctgggatcacaccgccttatgcatgatccaggaatcaggaagccactggtgtggccctgccagccagatacctgcaaaatagatgcttccccacctgacgtagttttgattcagttcttgattggcaaaagttgtgtcaggaattctcgctccaagggaggttgggagccattgtgtttagccctctggcccctgcagtccagcggggcaccgtaggaggagggtggaagagctgctgagaccgcaagtttaccagcctcccacccaccacatggtgctcagcacacaccatccttccagagaggagtgccactggggttgagatgacagggcctcgggttatcgtctgagatcgagagacggtgtcctctctgttcacgtcctccagctatctgtgtactgcaatagatagggaagattaatggcccagctttctagtcattgggcctttagtgggtggagaaagtccggtttctgttccaggttgtctgcgatactcttaaagggaatgcaggccccttgtcactacagcaagatgacagacagcaagagccaagtgggcttctgggtgacatgttggcctgagagaaggcatttcctttgccctgcagagattgctcagtggtcaggactttagggagaaatttatttgcagttcttccctttctaggtgtgagctgcggctgctcaccctctctaaatcgatgtgggtgtctgtgtctacgaaggtggaggagtgacctgcttttgtgctcacagaaggcaccaaggccaagcagggtgactgctgctgaagcaggctggcagccccagaccttttcctactcacggctgattggggggtccctttccaatgccaggggcgttgggcatgtttattcaacggtggcatggaggcagggaagtggggagaacactggcagctagtgtttgagttctgcttgtttggagtgggggcttgaagaagggatcacctgagcccaaacctgaaacgtgagaagggattgcctagcaaagggcagagggaagaacatgaaggacattctaagtacatgcaaaggcactgcggcaggcaagagctgagcatgtctgaggcatgaaatgagccactgtgtcaggagtgcattggaccgggcccagaggggagtgaggtgaactcagagaagtgggccagggccagtctgtgcaggtgttgtaagctgttgacaaggagtttggattttgaagggatctaactaggggaatgacagggcccaatttacgagttctgtttttaaaaggtgactttggctgctgcatggagattggcttggggatggccaagagtggactgaggaaaaggtcagggtggctactgcagcacttgtgggcaagagataggtagtggcctggactaggatggagatcttcctcacaacccctttccttagaacttctcccccatggttacatccaagaaatcagtagaagagcatatggcttgagaataagcccattctttaggggtggctggactgactccagcagtgttccttctacagtgtcactgtagtccaccttcacctgtatcatgacagcattatcgttacagtccttagcaaactgtgttgagcattttctgggatatggccctgaatcaggtgcagaaatagagatggattaaagaaaaaaaaattgtttcatcactgaacaccttccaagtccccagcaccaagcccctcactcacaggggacacccaggaggcacatgccactgactcctaacttggactcctcacttggacccttgcagagcagaatgacacgaggctggccagaccgtgctggggtcctgccctcatcctggtccccagcagcagcacctgggtgcaggaggaggacgcagatgctgtcttcaggggagctgggccatttgacaggtgggaggcattttcttatgactggggatgaggtcactgctgggggcacctacctgttggtgtgtggcctgatctgcgaggcagctgctcagggccttgttcaggggtgggagcatccgtggaaacagcccagtcagacagagccagagcagacttaaatggtggcatcctttcagctggcagccaggaggctgagctttgaatcagctttataatttgaaaattgatctctttgcattgggtggtgatttcgtgctaacaaaagccgtcagggacacaatgctgcctgccctaccttcatggcaccactctggattcaaaacattgagccagagatggggattttccactcctgggagtcttcggtagttgtgccaccctgttgtgggtgacccggagatactggtagaacatttcaagtgctcaggagccacatatgactggtagccagggtattggacagcctaggattatagaacgtttccattactgtaagcattgtattagacagtgttgctacagactggtctatatgtctgaggtcagggtggggatctaccgcagtgggtgggaaaattacttggagaaggggaggcccaggcccggaggtggtcagtcccgagaggccatacctgtctcacccgagaggccacacctgtctcacccgagaggccacacctgtctcacccgagaggccatacctgtctgtctcacctgtgtgcggctctgcactcctgtgcagggccctagtcatgtcatgggaccgcagcaatgcgcagagctgccaggaccaaaatagtgtaggttgttttcttggcctctggctagggagaggttgacattccatttttccccatgggctggttcatatgtgctttctccagatggtgtgctccagaaaggtccttgcgctctgggaatggtttacaatataaataaggtccctcatggagttttgggagggctcagaaggcagcccaccaggatgtggttttcagagctgccccagggctctgcacagccagctgccgtcttggtagcttctacctcgtgctccgggtgcagggatgctcccctcacgcagcttttctgggtggtggatgtgttctcaggctggggcttcctgccctctttccaagtgttgtccccaaactcctgggactcttggtttttggaactggcagcccgtatgagatggggggattaagggcaatgcaggggggtgagtacaaagattaaggtctggggacagccgtctcaggggaggcgtgagctgtggagggcttaccatgagtgaattgggggctgggaatgccaacagttggggacagggcagcttttatgtatctgagggaaaaggagaagttagtctgggaactaaaatagtctattaaattttgtcagtgccaaacagagagtctaggaagaaaaaattatataccacagattgaatggagcaaaattagagttccagccttccctggcaagccagagaagcaggagttgctcagtggctccagtacagcagatggaaacagggcgctttccacttttgcctaagaggcgccccgaggttactgcgggggcaggtggtgtagtggatgctgtcacgtggagatcatagtaaacagaaagaatgttcttggggtcagaaatccagccccttgtatctcgaggcctggagaagcccaggaggaggcgtgcaccttgtctgtcaccatgtacacgagcacatgtgtgcgtgcatgtggagtgtgtgagagagggctgaggaggcaggggtagagtctagcagctcaccgtgagccctgtgcctgctgcagcaaccctccgtcgccccattctgtgacctttagtgagtcagacactcctttgtcttcttatgtgttaaatggagacacgcatgcttgctgggtgttcaagcagttctcatgctttgggtgccttcattaattccaatgcactctttacatcttttcctgctggatcttatgagaaaggttaaggtcccggccttattggggtcttcctcacgttaggcttgggatctacacagtgagtgcagggaggacagggacgagttacaggagagatgagacgtctcattgtagggagtgtcacgtcctccgtgagcctgatgttctgtttaatgcagtttatccctggggcagagaacaggaggaaggtgaagggaatatatatggtgaggtgagagtcggtgtcacattgagaatgtggctatgaactgggtgtggcagagaggcaattttccaggccttgaggagtggaggcggggctgtaatgctacaggggccagatggcggtagagcaggtggcaactgttgcgggacaggaggcagctgaccagctggtctccaagaggacctgaggggtcttcttgggatcatgcaggggtggtagctatgtggcatgagtgatgccattccctgccctttgtgcccatggtgggcaacactaatctatcatcctcagagtcccttaagtatatagcattgtggacagtgatgtcaatcaattggcataaaagttgaaacttattgtctgtcactggtgtgatggaaaggatatagactggagtccagcagaaatgacagccccaccaggtccaagctttgggcacctaccaagcatattagctcgtttttcggttgcaagggacagagacccaattcacattagctttagctaagtcacttaagtcacttaaacatcacagtgtgtgggggaaaatcacttggagaaggggaggctcagccagccttgcagtacagccctaatggaggtcagccccaagaggccacacctgtctcacctgcctcacctgcgtgtggctcaggtaagggctaacttcaggtgtggctggatgaggaatctggtgaggttgctcgggctctgcctctggggcaggctctctctaggtgaaaatgttcacatggctaagccaggtcatgtgctcttcacaggttcctgtggggacggggtggaggtgggggtgataggttctggaaagcaggtcacatggggagcaaagttatcttggaggtcaaacatagaaggatcagcccaagataagagttggggaggtggctgggagaggcgccaagtgttcatctgtgtcttaacaggtgaggagagggagggggtcaataaggttgagccagcaaccttaggacccagcagcttccctggaagaccctgtgcacatggaccagaaaaggccactgtgggcggccttgggtgtcatgtatgtgcaactggtctggctgcttcggccacagtctctgggcagctgaagtgtcctcagatgccaacctcaccgcccacagtagcaccctcttatctgcggcttttcttgatcctgcggcacctggccaattgactagcggtaccacgtctcaaggtcatgcatgtgttctgggagattcaggtttgggccaggctgagctgatcgcttggcaaaccttacagactctagagcgaggcatccagcctaacaggccaaagagtgtttgccaagcatatgtgctgtcttagggacagtctcagaggcttcgttgcctagacaccagagcagggcagctgtccctgcgcaggttggagccctgggttgcactggttccaatcaggtttccttcctgacactgtccctctcccctaccccatcaacccctgccactcacagctccttttcccagatagcaaatgctgtctaatgaatcaccccaaaacaaagtggctcacaacagcagacaccctgttactgctcagtctctgtggctcaggaattcaggaagttcttgtgtgggtcagtaattcaaaaagttactgatttggggcagtcctgacttggggtctctcctggggtggcagtcagatggtgattggagcagctgggggctggccagggctccctcttgccacatggcctctctgttgaggctagtctgggcttcctcacagcatggcagctcagggctgaaaggctgccttgtgtgggggctggcttcctccaggacgaccatccagagacagtcagggggatgcaacgtggctttttttttaacctatccttggaagtcacacagtgtcacttttgctgtactttattggtaaaacagtcaccaaaggctgacctcatttcaagaggagggcctagatctttctcaatgaaaagggatgtcagatataaagggatttgttgacatgatttaaaaccatcacagctcccctggcccctcctggtcaaccaacacttaaagcccagatggctttgaggtagctggatgtgaccttactctagtccagcccttctcattttattatatttatttttgtttattggaactcaggtgcagagagttgagtgaatcatactccagttcattgtacgttttccatcattgattcatgcagtgacctctcatattcactcactcattcatttatgcttcctccttgcccctgtatcttatgctcattttcctcctcaccttccttaaacaatcattctattcgatttcatgaatatcctttcatttgcatgggttcttaaaatatgtattttaatttctaggtaatgtgttgtgttgtatctgtttctgctgaggtccatacgtgctgtaatgcacggatctcatctcttgcccacctaaggtgaggcaaggagactagagcggagtgacacgcccaaggtcacccagctaaaccaggaccgcaacgatcctggccctcttccctcagcatctcacactcatgtttccacgtgccacctcctaaccgcctgcaatagcttgaaataaggttttgaaaaaattgtgaatctggggtccagagagtgtcggaagtgcccctgttttctatctagtaactgttgtgttcttttctcttttgccacaggttccaactatgggagcccacgccccgcccatgccaacatgaatgccaatgcggcagcggggctggcccctgagcacatccccaccccgggggctgccctgtcgtggcaggcggccatcgacgcagcccggcaggctaagctgatgggcagcgctggcaatgcgaccatctccacagtcagctccacgcagcggaagcggcagcaatatgggaaacccaagaagcagggcagcaccacggccacacgcccgccccgagccctgctctgcctgaccctgaagaaccccatccggagggcctgcatcagcattgtcgaatggaaatatcctttgttcaccgggctgggcatgctcctgggacctgcacgctgggtccagccctccgaggctccctgggccacgagctgtgtcagctgtgctgggctacaaacggggcctcgggcctactgcatctgcatcactggggtgctgtgaaatgcagagttctgggccccgccctagactggatgaatcagaatatctggggacggggcccagcaatctgcttgtataataagctgcctgggttgggtttttgttttttgtttttttcatataataagcaacatttgagaaaatcagcctaagaagttatgaaatatcatctcctgtagctgagcttgcccaggggcccactcatgtgttggggtaacagtcgttagttacatgctgcctcattcccttctttcccttctgtgccatggcgctggatgctttcacggccttccctctctctagggtgaaggggctcaggagatggaagagcgtagtggtcagggcccctggctgttggctggagggccctgaagcagtggttctcagccctgattgcacattagagtctcctggaaagttataacaaactacagaccactcagttccacctaggcataaaaacaaacaaacaaaaaacaacaacggaaaactctctgggtaattctaatgtgcagacaaagttgagaacactgtctggaagtgttctgtttgtccatatagaaacaagcaaatgggtccttcagaaacagtggctttgaagggatgggcgctcgctgtggagttacaagccccttacttcatcagaatcctggggctgtagaaattgggaaggacttttttttttttttttttgagacggagtctcgctctgtcacccaggctggagtgcagtggtgccgtctcggctcactgcaagctcctgggttcgcaccattgtcctgcctcagcctcctgtatagccgggaccacaggtgcccgccaccacgctcggctattcttttttgtatttttagtagaaacggggtttcaccgtgttagccaggatggtctcgatctcctaacctcgtgatctgcctgcctcggcctcccaaagtgttgggattacaggtgtaatctgccaccgtgcccagcccagaaaggacctttaagtgctgaagttcctcccccacttccacgagtgatgaaattgagccccacaggagaggctccccagggtcatgtggtcaggaacagatgggactagaaccctggtactgactgtgggaatttttataataaggattcctccaggcaggactgctgtgtctctcaagggccaggatgggagcattaggcttcatcgatgagtttctatggaaagatttaaaagtctcaggtactggttgaaagaaggtagcctagagataaagaaagtttctattgagacagaaatgttctataaatgtttgaggccaggtgcggtggctcacgcctgtaatcccagcactttgggaagccaaggcaggtggatcacctgaggtcaggagttcgagaccagcctggccaacatgaggtgaaaccttatctctgctaataatacaaaaattagccaggcgttggggcacatgccagtaattccagctgctcgggaggctgaggcaagagaattgcttgaactcgggacgaagaggttgcagtgagctgagatcatgccactgcactccagcctgaggaaaagagtgaaactctgtctcaaataaataaataaataaatataaatgtttgagcccctcaacttaaaagtattttaagaaaatgcattttaaaacaagtggctgcagctgcctgagtggccaagcatggttttagtgcccggggtactggatgggagactaggctttagtcagccccataggactgcttgcatatctgctcacggtggagtcagggagtgggagagctgagggccctgcaggtcaggcacccctgagagaagggcagcaaggcccagagaagacaaagggcttgccctaaatcacgcagctggcaactgacagagctggacttcaaatccaggttcccctgaccccgaagtccatgcccatcccacaccccatgcatccatagtactgggtaggactaggcaggtactagtagatactaggtgggaccggtgaggtcttaggaggatgctcagggcctgcagtccaggtgcactgggacacgccggacctggatccgggcctaacacctactccctgggtgctgtggccacccctccgggggagtgtgccttcccacctggaggagaggaagggggcccagccttagcagtgccaggtgggtggcattccaagattgcttgggaagactggctggacagggaaggagatagcctggagtactagccagccagttcttcttgaagaagtggaatccgaccctgtcattaggaagggaactcagcttaaaaagtaatctgggcctcaaaaggcgacacagagcacttcccagggcttacctgggttctctgcttttcagccagtggcttttcttctctgcctgattggtttttacacatgatcttctctggcattagcccagtgcctttagcatgaagtgaaggatggataggtggagagtctgaatgaggggaggggaactgatagtgccagaaaccccaagctcagctgtgccccactgtggtggaggcaatgaagtgacatgttctgggtgtgtgtgcacgggtctggtttggctgggttgttgcatccttgtcccgatggggagagcacaggcaccagctgatggaatgaaactggccagcctgtgggctcggtgtcactttcctaagcaggcgagaaaaggtttgggaggcaagaggtggcgtggtaggagggctaaaagaactgcctatgaaggcttcaaggtaactttagagtggatcagtatagaatagtccttaacactgagactgcctgagcttggatcccatcctactacttgctctgtgacctggcacaagttaacgtctgacccttctgtgcctcagttttctcatttagaaagtggggatcacaagcgtacattccacacagagcatttctgttgggccgtaagaatgtgcctggcactgagcaagctcttggcagaggtcagcttctgtccttactgtcaccagcaccagcatcagcgtctgtctcccatcatcactacttgtgcctcatccaacacaagggcagcagaatgtaaaagcttagtccgtctgggttccggtccaggctctgctatatgccagcttggggtcttggactggctgctttacttttcacccctgcaaagttgggagattgacaggtccactgtgtggcatcttttttgatatcaaggtggacatagaaaatgttctacaggaaaatggatcctcagaagtacccacaggactagggagactagtgctaagataatcactcgggttcctcccagttcagaattctgtgacgctggcccagggctgccccttaacacgtcagaaggccgtctgtggcaggggagtgaacactggacttggtgatcgggaaatccgggctctagtctcagctggtcattaacttgctgtggggccttgggaaagttcctcaggctctctgggcctcagagggttagactagatcatctctaaggtctctttctgcctcaatattcactaactttgtgagtatggatttccctgagagaattatggtggtcccttcaccccggatctccacccctctctgtcttcctcctcctcctcctgtgagactccatgaactgggctgcaaacttggcagtgggagcggggtaggtgggagtggagctggaagagcatagacgggcccttcctgggaagcttccccttgctggccttccatggagggtgtggggtggtcccgtcggaaggggtattatcacattagctcatttttctcttgagagcgtgtcctgccctgaaaatgtgatgaagaagtcagggcatgggaacctctgcctgcactactactggtgagggaaccttgggctgtcccactagagcccagcacacaccaaggaaaaatcaggaggccttggaatcaaagctttgcctgctgaagcgggacctctgcagaccagaggggtttctatgctgtctgtgagactcagccttaaagaggagacagctttccttccctacactcaggacggaccccctgccgtactcttgggggtcttcaggatctctggaacctgccagagaatgagagagaagaaatggaaaccactcttaaccttagtttaaaagattaaaaataaaatctccaaatttcaatgaaacccagagaaagtctctctgtcttggaatcctgttccacccatgtcccccgttccaggtgggcgtgggcccacaggccgttcggcataaactgtgaagaaacggggtgcttggcgcaggccatgctctttagaggcaacctcaggcacacattggggagaatgaagaccaatgcaatctaaataaatgaaaggaggggaacaagtttttagaaatctgtgtttactctggcacgcgactggcctccactgcttttgacatattagggaaaattttggcggggacccactagaagcacttaaaaaggcatatgtttcttttcagaatacaaggggcttggaatgcattgtttaaacaaaattcttatgaatctttgattcattttaaaaaatatgtagattatgtttgtttcacttgtactttctgtggcattaacttccttgactccctttctcagaccatttgaaataattattttactgactatttttgccaattgtgtggccttagcgatctatattccctttccagaagatgattccaacgccaccaattccaacctggtaagtccaccatcctcaagtctctgctttttcactcgatggagaactgcgttcagatcacatagatgcatggaatgtgggagagaagtgagacgtgtgtttggcatgtgcaggagccctgcagagctcacatcccgagtgctgttttactctttattcaaatcagcacctgtctcattccggcctgttttccaaaagaatattccagttaggtggtggtgagctctgtgtgtgtgtgtgtgtgtgtgtgtgtgtgtgtgtgtgtgtttagtagcaaatcccgtgactgctacaaaatgtgctgcaaaagttgtgagtgcaggtgttcgctgcagcgaacatctgttcttggattgtgttgtatttcctttgaatgtctttgttccattggtggggtttgctcaggtgatctggagtgttgctgcacgataaataatttctaggaagcttttaggaacatttgcttttgcagccaacatgtattattgagttagaagggccttattttattgggaaaggcggctttccatttggattgttgaggggccagctctggcaatttggggttagaattggtccatggaaaaagtggagagtgtgtttacttttggctgagcttgaagtcattacaaagacttttgctccatctgggcatgtgaggaaaagagctctggaatgcagttggcaaaattggggcactccaggatgcctctgcaaaaggcatgcagggaaaatcccgtctctttctccccctccattgcagagacaccgtcactctccacgtgatttccacatggcgtgtttggtcatcagagccaccgtctttcccctgccgtcagtaccttcctttaattactgagatggaaccgtccaatgagatggtttttaaaagaagcaggcagcttataggattctcctttccacagctgctgggctgatgccatcacagggtggttcttgtattttgtaacctttgacattttcttgggccctttcagcaaaaaaaaatatgatgcacgttttaacttctcagctgtcgccccagttttttcaggtaaccgctgatgcatagcaggtaaggtgttcaccgcctgcgggctgtggtgtcttgtggctcggcttggggccctttgttggggacaggctccaaaaatttcaaagctgggcacaccactgagtgatggcatggccagagtcggaaggcagagcatcggccgccgtccgtgaggccatccgaagcgtgacctcatctcttaaggggcaagaaatctttactgtgtcaaaataaatacaagccaaagtgtctccctgaagcaggaactccttcccttggttccatttcttccctgtgtagccacctccttcctctgccatggtcctcccaaccctcctacagtttcacatttaatctgcaacttttaaagaggagccttcgttccacatagaatccgtatcttgttcttaagctgatgacacttggggctgctcaaggcccatgcagtggtgaaggtgtgtagaggagtttggtttttcttaggtcctgagatggccacatgtagccccttcacccctcggtttccaggaggattaagggagccacttggcttgctgagctagagggaagccctgggctggctgagacccctcaactctggacctcctggaggcagaggggctcgtaggagaggacaagaggtcaccctggacttcttctggagctggagtgaggttgctgtgtacagatgaggtgggagggatggcaggtttttatcacatcacagagtgatggaagaattctaaaggaggtggtggggctgcttgcacaactgtgtaactttaccaaacatcatcgaattgtgtacttacagggggtgaactttatggtatggtaatgatacctcaaaaaagctgcagatgacttctcattctctgcattccacaatgtcgcacttcccctggggcagtgaatgctgccagctgaaggtggggggtggcatcagaaaacccttaaaacagatgaataaatacgacctcatatcagctaataaatcagaacacgattctgccccatggagaaacccatcgcgagtgctgtgacccggcctcccggtccttgctctctacagcatcttgaagctgcagcatctttgcagatgccccctttacaaagcacattctccccttgcttcttccagcctctcctcctgtgtctacacgaacgtttactaggcttttgtcctgagccctctgattttcttcttctgcactctccctttggggagctcatctgtgtccacagatttaagttacctttccaagtaaattgttgctaagactgacatctccagtgctaagcctttccaaaggcctggccccatatttcccgcattggagaggcctgtggaccggtgcagcgaccgctgaggcctgcacatcattacaacccgagagaactccaactgtgcagaccccagctcccctgcggatctgattcacatttagtagttctggggcatggtctggggatgcgcatcaaaaaatttcctcgcagggatgccgatgattagtcagctttgggaacaaccggcctcttgggcagagcaaaatttgagttggacagacctgacttcaaatcttggcttctccactttaagattaagtctgggccgggcgcagtggcccatgcctgtaatcccagcactttgggaggttgaggcaggtggatcatgaggtcaggagatcgagaccagcctggctaacacggtaaaaccccatctctactaaaaatacaaaaaattagccaggcgtggtggcgggcacctgtagtcccagctactcaggaggctgaggcaggagaatggtgtgaacgtgggaggcggagcttgcagtgagccgagatcgcgccaccgcactccagcctgggtgacagaaggagactccatctcaaaaaaaaaaaaaaaaaaaaaaggttaagtctgaatcttagtctgaggttatttagtctttccaaacctcagttccccagcttgtaaaatggaagtgacctcagagggttctagggaagagtagggcgggcagtgacaattatatgtgccaggatgtcttgccaatacctcaaacaagccccaaatagaactcattctctctcccaccacacgaccctgtccccctgaagaaaacgaaacatagcccaggtgaatgctgctccttttcttttcccttggccgggttgatggcattgctggccttgctgtcacatggaaccatctctgacatcttcttccccttgccatgcccatctgagcaggaatccagtcttggagattgtaatttgcaatgtatcacatttagctttctttctattctcaaagtcatttgttcagacttcctgtgccttagtttcttcatttataaaatggaaataacgataatgacagtacctacctcatagggttgttgtgaagattaaatgagccaaaatatgtaaagcccttaggagagcaccttagtaagggcgaagtgttgggtcttgttaatagtgctggatactattgttattattgtcatcatcatcatccttgtcaacctaacccaggccctgttgcctttttcatggactcttacagtcacctccttcctgctgtcctccctctggtctctccttccactggtctagctcgtgtgtgtgtgtgtgtgtgtgtgtgtgtgtgtgtgtgtgtgcagtcatttgccaaacatctataccaacagataggcactatgattaatagggaagatgaaactgtaaacagttgtttcaaatagtgaaaggtcttataaagggccagggtgtcagggtggaagaactgattcattttgctgtagagaaaggattaatggcaagtttcacataggttgacatatttgcattgcgtctctcaagaagaggatgccataagagatacttcaggttgaagtgtactcatgtgcaaaggcatgagtatacatgtggtcacattctttaggaccagaggaaggggtgctggttttgaggggatgagaagagccaggtgatgggggcttgatggcccatgcaaactgttggacttaactgcaggtgaggaggaggctcgaaggctttaacggcagaggagtgctcttgcagcatgaggaagatggctcagacggaggcctcactgtttgtgaagagaaaaagaaagcttgccagagtccagatggtggtgacaataaggatagagagggggcagtggatttaggaggcaagcttgcctggacgggtaaccagttggatatcatgggtggcggagagagctggctcccaggatggtgatacgaggagccaggtgcccttggccaggagaaagacttcaggaggaaggtcatatttgaggggcagggaatgatgcgtacgattagggattgtcaagtggaggagcccgtggagcgtgaggctggggatgtcctaccggcggtcgacaggagcctgcaacccaggagactgtttatgctgaggatggagacttgggggcaacaggaggagagacacaaggagaagctgtaggtatggcccagagcacctgcatcagggtggagtgggagggtagcagtgaccacagccagaccctggagaacagtgacgtttgcagagggtggaggaagaggagcaaaggaaggtcatacaccacgtgtcaggaaggcttagcctgagaggtaggaggggaacctgctgagagtggagtcttagaagctaagggaacagagagtttaagatattcaagaggggctggttggtagttcaaaatcgtggctcatggcaactcaaggccaatgacaagaggattggcctgactgagaagagctgagcttagggccaaaagtacgagaagaggatattgatctgtgtctgtacccctatggaggccctgaagtagtaggtgcatgacaactgtttgctgaggttcaatgcttgaaacattcccattgttgtgccagagtgggatgccccaaatcacttatgtaccccgaaaatgaagcttgagaaatcctccattagtttcatagctttttttaaaaaattaaagaattgcgatttcagagccctactctgagaaacagcaaagaagagatgctgatgcacctgaagcaggtggctctcaacccctgtggcataagttcatagagatgattaaaatgcatgttcccaggccctgctcccagagattctgactctggagtgggccctaggagtttgaatttttaataagctcccctggggttctgatgcaagtggtcctgggctgctctttgagaacagtgacctagaatgttcctcatggtgtgattggatccaccttcagctccctccgcaatcagctctgtctacccacaggttccctttaggatccaagcagaaagacgacacacgtcaactgctgagagctttcccactccattgggttcaagaataatctatttagcaaagcacactcacactgtcacagaattagaaaagattcttcttttcacacacacttgcaaattcacatctgtgcttgctcctgctctcagattccctcgcaaacgcatcggcttccacccattctgtcgcaggccctttcctttctcccacttatttttctaacactttgctttcttctgtttccaagagatgaaaagtattccagaatagagttttttttttaaaagatctctctctcattatttaaataaaagtctgtttgttgtatgctccatctaacatacacttttgcaccaaaatccatcatctttgttatcttttcctcatgctagtgaagcataatgaaagctgaactgggccatgacatgacaattctttctttagatttagtgctgttattggcaatgccacctctatgcagcacatcgtttataatatagcagctgtaacccctgtctaccaagagctattacctgttaggtagattgtctgatgtctgttgaacaagctctgcaagcggagccgactcattgtgtgtggaaaacttcctgtcctctgcataccctgaagcccacgaagacttggcttgagttgaaatattaagagaatatatttggcatttgaccttgtgcaaagaacagtgcatgtactttctggagcaagagccaagcttgaagtggaggtggagagaagacgggatgaggccatcaaagggatcatcttttggctgggctttcttccttcagaggttgtgagaggagaagccgtccgtcagaggggcttgagctagactaggaagaaggttgagatgtcagatttgcccatttattggtgtaaaattggggcaaccagagttgcctcataacctggctgagaggattaagtgagttaccataagtaaacttcacaggacatgcccagcacaggcgaatgtgtgttgctctttggaactctaagccaggctgagggcccctcccctctgcctggtccctgggggtaagtcacagtcattggcaccttgtgctagctttggcctcagaagggtgggaaagaagagaccaaaacgctgtgctttttggcagctgtgacccagcaagattagtgtctgtgtgctcacccttgccttctgactacacagggagagaagctgggatccattaatggccaaagaagagccccagagggagagcactggtgggggaccccactcccccacccctgagctttgtgtgtctcttgccagtctgctcaggaggtgcctgtcagcctgaggttcccccattcccacacagtgctgggttgaatcacccgacatggggccctgcacttggaccaccaccgcaagttctgagatgcgtctgagccctatcgccccccgtgctttgagaagtgaatggaaatgccactttgggttcccctcctctccctgcagtgaactgtgttttcttttattatcaggtttgcctaagagtgagaagtatttttatagggctttcatgcatcaacaataatgatgacaatgaaatgagctttattattgctatctcttatgtgttgtcctaatgcagcaggtgttagggtttgcagaaatgctagggttataaaatacactaatagataactacaagcaacaaaccacatagctactgtatcatgtacaaacaccctgtcctgtgctgtgtagtggggtgtggaaggcagggtggagagcctgtttttggatgagagaatgagcttgacacagcgcattgggaaagtgcttctacggagtcagttctcccctcagattttccggctgaatgggtctgagtgggacctgggtgtgggtgtgtcttaaaagctataccagagccagagttgcaggcactgacctaggaagagagatctgaactgtgtggccttaggtcagtcacttaacctctctgttggtatctcttttggcacgtggagtagtaatgcttgcttagtcattgtaattgcctttattgagtgaccaccaggtaccagagctttgcgtgcaatgtttctaatctccacaactgtaaattatgctttctatttatttgtttacttgatggtagagaatgtatccctcttgttcatggctgtatccccagtgctttggcaataactggcacacgtaaggctctccataaatatctgctgagtgaaccctgggtgaatgaatggatcctgtgaagtgttatccctttatttcagataagaaagtaaagtctcagagaagtaaagtgacttggtgaggcagtggcagggctgtagttggaacttaggactgtatgaaaccacagcttgggttctttgctctgttccctgggatgtgtagggtcgctgtgagtatccaatgaagtatatgtgaaaatattttaaagattaaacactctgtagcagtattaacagatttaaaataaaaacaaacaaaatttggttctgttgcaaaataaattcagtaagtaccaagttagccaaaggtaaatacattatttttttaccttttttttgagacagagtctctctctgtcgcccaggctggagtgcagtggcgcgatctcggctcactgcaagctccacctcccgggttcacgccgttctcccgtctcagcctcccgagtagctgggactacacgcgctcagcaccatgcccagctaatttttttgtatttttagtagagacggggtttcaccgtgttagtcaggatggtctcgatctcctgacctcgtgatctgcccgcctcggcctcccaaaatgctgggattacaggcgtgagccactgcgcccggccaggtaaatacattattataagacttctccaagcctctaacacaacagcaacagacactacttatgacttcacaccatgtgcagatgctgtcctaagtgccttgcgtataaatgcgtttaaacatgattatagcacgatgagatgttattatcccattcaatagatgagcacacacaagctcagagaaggtaaataattcaccctgtgagatgtagccctgaagcgaagtcatggccatgcagaagtgggtgaggcatctcccggtctgtgttcttagccattctgctacagctgcctccttgtgtggtaaggtgctccgtgagtccctggactagccagacagcacatcacctttcccactcataccatcacagacatcttgaagaatggtgttcccgggctcacacctttgggaaatgctgctctgtgttgccccaagaaccgatgcattaggagaaaggacagagctggaaacgggatgagacacgttgcaaggctggtgtaggaaaggagcaaagaccacaggactgtcttcatcaggaacatggcatttcaaaatagatggcagcttctggatgggtctgtgcttcatctcatggtcataaacccgcagagagcctggggcaattgtttgactcagggtttactcactaaatatttcagagagaggagaaagcattgtctgctctgcgtttgccagcggatgggaaaagagagatgatgatttgaagtctaaatatggtgacacctcttgctccagttttatccatctttattcattttttgggggagaatcttccaaataaattcactgtttatgtaatagaacccctttcatgtaccaaacttcttgtaatttaagtatatttgaaggaagtctttccagaatataaaatacaaatccctggatccttaaaagaaaaatctgaacatatttcatcctttttctgggactatacaattcttaggaatttcaatgattgcacctgttgtaatgctggggagctgtcaggagagctaagcaacccgcacagggtcccggaacgtcctgacctggggaagatttgggatgtgcctttcatgcaccaccctgttggggtgtcagcctcctccagcaccagcctgattaatttgctcccccctctctcctgcaggcttgggaaccagttgatcaagtccattacagttatgtgcaaagttagagtaaatagatcctgattgaggacctatggggcttacttatgaataaagtgcattagctttaatttatgggttttataacattgattttggcttcttagaagccatttttcccctttattctctttgttctctctagtttctgtatgattgaagttgttggattggcgccttctaactaataataatagcagcaataacttcagcccttacgctgctggcattgctctatggtccgtgtgttaactcatttagtcccctcgactaccccatgagacctttcttttttttttttttttttttaatgccaaacattacattttattacctttgagcttattaaccagctttgcgtttattagcaaatacatttaaatatctcttttttttttcttttctttttttattatactttaggttttagggtacatgtgcacattgtgcaggttagttacatatgtatacatgtgccatgctggtgcgctgcacccactaactcatcatctagcattaggtatatctcccaatgctatccctcccccctccccccaccccaccacagtccccagagtgtgatattccctttcctgtgtccatgtgatctcattgttcaattcccacctatgagtgagaatatgcggtgtttggttttttgttcttgtgatagtttactgagaatgatgatttccaatttcatccatgtccctacaaaggacatgaactcatcattttttatggctgcatagtattccatggtgtatatgtgccacattttcttaatccagtctatcattgttggacatttgggttggttccaagtctttgctattgtgaataatgccgcaataaacatacgtgtgcatgtgtctttatagcagcatgatttatagtcatttgggtatatacccagtaatgggatggctgggtcaaatggtatttctagttctagatccctgaggaatcgccacactgacttccacaatggttgaactagtttacagtcccaccaacaatgtaaaagtgttcgtatttctccacatcctctccagcacctgttgtttcctgactttttaatgattgccattctaactggtgtgagatggtatctcattgtggttttgatttgcatttctctgatggccagtgatgatgagcattttttcatgtgttttttggctgcataaatgtcttcttttgagaagtgtctgttcatgtccttcgcccactttttgatggggttgtttgtttttttcttgtaaatttggttgagttcattgtagattctggatattagccctttgtcagatgagtaggttgcgaaaattttctcccatgttgtaggttgcctgttcactctgatggtagtttcttttgctgtgcagaagctctttagtttaattagatcccatttgtcaattttgtcttttgttgccattgcttttggtgttttggacatgaagtccttgcccatgcctatgtcctgaatggtaatgcctaggttttcttctagggtttttatggttttaggtctaacgtttaaatctttaatccatcttgaattgatttttgtataaggtgtaaggaagggatccagtttcagctttctacatatggctagccagttttcccagcaccatttattaaatagggaatcctttccccatttcttgtttttctcaggtttgtcaaagatcagacagttgtaggtatgcggtgttatttctgagggctctgttctgttccattgatctatatctctgttttggtaccaataccatgctgttttggttactgtagccttgtagtaaagtttgaagtcaggtagtgtgatgcctccagctttgttcttttggcttaggattgacttggcaatgcgggctcttttttggttccatatgaagtttaaagtagttttttccaattctgtgaagaaagtcattggtagcttgatggggatggcattgaatctgtaaattaccttgggcagtatggccattttcacaatattgattcttcctacccatgagcatggaatgttcttccatttgtttgtatcctcttttatttccttgagcagtggtttgtagttctccttgaagaggtccttcacaacccttgtaagttggattcctaggtattttattctctttgagcaattgtgaatgggagttcacttatgatttggctctctgtttgtctgttgttggtgtataagaatgcttgtgatttttgtacattgattttgtatcctgagactttgctgaaattgcttatcagcttaaggagattttgggctgagacaatggggttttgtagatatacaatcatgtcatctgcaaacagggacaatttgacttcctcttttcctaattgaataccctttatttccttctcctgcctaattgccctggccagaacttccaacactatgttgaataggagtggtgagagagggcatccctgtcttgtgccagttttcaaagggaatgcttccagtttttgcccattcagtatgatattggctgtgggtttttcatagatagctcttattattttgaaatacgtcccatcaatacctaatttattgagagtttttagcatgaagggttgttgaattttgtcaaaggctttttctgcatctattgagataatcatgtggtttttgtctttggttctgtttatgtgctggattacatttattgatttgcgtatattgaaccagccttgcatcccagggatgaagcccacttgatcatggtggataagctttttgatgtgctgctggattcggtttgccagtattttattgaggatttttgcatcagtgttcatcaaggatattggtctaaaattctctttttttgttgtgtctctgcccggctttggtatcagaatgatgctggcctcataaaatgagttagggaggattccctctttttctattgattggaatagtttcagaaggaatggtaccagttcctccttgtacctctggtagaattcggctgtgaatccatctggtcctggactctttttggttggtaagctattgattattgccacaatttcagctcctgttattggtctattaagagattcaacttcttcctggtttagtcttgggagagtgtatgtgtcgaggaatttatccatttcttctagattttctagtttatttgcgtagaggtgtttgtagtattctctgatggtagtttgtatttctgtgggatcggtggtgatatcccctttatcattttttattgtgtctatttgattcttctctctttttttctttattagtcttgctagtggtctatcaattttgttgatcctttcaaaaaaccagctcctggattcattgattttttgaagggttttttgtgtctctatttccttcagttctgctctgattttagttatttcttgccttctgctagcttttgaatgtgtttgctcttgcttttctagttcttttaattgtgatgttagggtgtcaattttggatctttcctgctttctcttgtgggcatttagtgctataaatttccctctacacactgctttgaatgcatcccagagattctggtatgttgtgtctttgttctcgttggtttcaaagaacatctttatttctgacttcatttcgttatgtacccagtagtcattcaggagcaggttgttcagtttccatgtagttgagtggctttgagtgagattcttaatcctgagttctagtttgattgcactgtggtctgagagatagtttgttataatttctgttcttttacatttgctgaggagagctttacttccaactatgtggtcaattttggaataggtgtggtgtggtgctgaaaaaaatgtatattctgttgatttggggtggagagttctgtagatgtctattaggtccgcttggtgcagagctgagttcaattcctgggtatccttgttgactttctgtctcgttgatctgtctaatgttgacagtggggtgttaaagtctcccattattattgtgtgggagtctaagtcaatttgtaggtcactcaggacttgctttatgaatctgggtgctcctgtattgggtgcatatatatttaggatagttagctcttcttgttgaattgatccctttaccattatgtaatggccttctttgtctcttttgatctttgttggtttaaagtctgttttatcagagactaggattgcaacccctgcctttttttgttttccattggcttggtagatcttcctccatccttttattttgagcctatgtgtgtctctgcacgtgagatgggtttcctgaatacagcacactgatgggtcttgactctttatccaatttgccagtctgtgtcttttaattggagcatttagtccatttacatttaaagttaatattgttatgtgtgaatttgatcctgtcattatgatgttagctggttattttgctcattagttgatgcagtttcttcctagtctcgatggtctttacattttggcatgattttgcagcggctggtactggttgttcctttccatgtttagcgcttccttcaggagctcttttagggcaggtctggtggtgacaaaatctctcagcatttgcttgtctgtaaagtattttatttctccttcacttatgaagcttagcttggctggatatgaaattctgggttggaaattcttttctttaagaatgttgaatattggcccccactctcttctggcttgtagggtttctgccgagagatccgctgttagtctgatgggcttccctttgagggtaacccgacctttctctctggctgcccttaacattttttccttcatttcaactttggtgaatctgacaattatgtgtcttggagttgctcttctcgaggagtatctttgtggcgttctctgtatttcctgaatctgaacgttggcctgccttgctagattggggaagttctcctggataatatcctgcagagtgttttccaacttggttccattctccccatcactttcaggtacaccaatcagacgtagatttggtcttttcacatagtcccatatttcttggaggctttgctcatttctttttattcttttttctctaaacttcccttctcacttcatttcattcatttcatcttccattgctgacaccctttcttccagttgatcgcatcagctcctgaggcttctgcattcttcatgtagttcttgagccttggttttcagctccatcagctcctttaagcacttctctgtattggttattctagttatacattcttctaaatttttttcaaagttttcaacttctttgcctttggtttgagtgtcctcccgtagctcagagtaatttgattgtctgaagccttcttctctcagctcgtcaaagtcattctccatccagctttgttctgttgctggtgaggagctgcgttcctttggaggaggagaggcgctctgatttttagagcttccagtttttctgttctgttttttccccatctttgtggttttatctacttttggtctttgatgatggtgatgtacagatgggtttttggtgtggatgtcctttctgtttgttagttttccttctaacagacaggaccctcagctgcaggtctgttggagtaccctgctgtgagaggtgtcagtctgcccctgctggggggtgcctcccagttaggctgctcaggggtcaggggtcagggacccacttgaagaggcagtctgcccgttctcagatctccagccgcgtgctgggagaaccactgctctcttcaaagctgtcagacagggacatttaagtctgcagaagttactgctgtctttttgtttgtctgtgccctgcccccagaggtggagcctacagaggcaggcaggcctccttgagctgtggtaggctccacccagttcgagcttcccggctgctttgtttacctaatcaagcccgggcaatggcgggcgcccctcccccagcctcgctgccgccttgcagtttgatctcagactgctgtgctagcaatcagcgagactccgtgggcgtaggaccctccgagccaggtgtgggatatagtctcgtggtgcgccgttttttaagccggtctgaaaagcgcaatattcgggtgggagtgacccaattttccaggtgcgtccgtcacccctttctttgactcggaaagggaactccctgaccgcttgcgcttcccaggtgaggcaatgcctcgccctgctttggctcgcgcacccactggcctgcgcccactgtctggcactccctagtgagatgaacccggtacctcagatggaaatgcagaaatcacccgtcttctgcgtcggtcacgctgagagctgtagaccggagctgttcctattcggccatcttggctcctcctcgagacctttcttgtaatcaccccattttaaagatgaggaaggggcacagggcaatgaactaacttgcccaagtttgcatagctatgaagcagtggagctgggattccagcctgggtgtgtggctcccaagtctgtgcttttaactgctatgctgtgtggcccccaactaaggtataaatgggaggggtattttgctttgaatacgatgccttaattatcaggccttcaactagagtttatgcagtgtgtgcgcttctgtctttaccaagaggaccaagggaggagcaacagtgaaggagggagtgaacgtccccaggctgggtggtgtctgtaggggtcctgggggcatgccatggagcccccaggccatgccatttggaaagcataaggggtaggcaaaggggaggccttttcatctgctactacctgagaggtagacttggctttgaggccatattttcccagggatcagtgattcatattacctgagatcctcaaccaaacaggcccccgggcctcttcctaaatagatgagaatctctggttggggtgagggaacccagaatcagcctgactttctgagacaaacttaaaacttgagggacccttctcgtggactgagtccttggaagcagatcttgggagctgctgggcctgcatttgaacttggggccttcatgggaccccagtcagtactggtggttggcagggctcagagcataacatgtgggggaccccacggcgccccgcccaggtgagagcagtccccctctcgtgccgagaggctccacaggttttgcctgtgcaccctaggccccactggagacgtggaaacatcgaagagctacggcctgaacaccaggatgtgggatgggtagtaagagagtgctgagctgcatgtcctagccctgggctctggttccagttctacctctgcctggtggcacggccttgtcacttcacttctctgagttttaggtttctcggctgtgaaataaagataataattcctacctcactgagttatggcaagggcaaatgagaatatagatagaaatgctccgcccagctctaccaaaaaaaaaagtatatatatacacacacatacacacacattagctgggcatggtggcttgcacctgtagttttagctgcttgggaggctgagacgggaggagtgcttcaacccaggagttcaaggcagcagtgagctatgattacaccagggtgatggggcgagaccccatgtttattttttaaaatgctctggaaaaatgcaaagtgccatataaacatagaggcattattgtgatcattattactgttatgattcaaactagacagatatatttgtctctaaaatacttactgtttttttttttctggcacattcctctgtgaacctttttcctcagcctcctctcaagataacttagagatgcaaaagaactagaagccaagttccaaatttagttcttgacctttccaagatgggtggtgagtggtgtggctgcaacctgcctgctgccaagagtctggcagggctgccggggtccgggagcgccaggccagtggaccctgtctttgtgtgcagtcctggagccgacacatcgcctcacacaggcgcccctgccgggagctcatgcgggccactccctgttttctcactgggtctagctgaactctggcacagcgagtgtagctgctgagtagttcgtttggtgctgtcctgtgacttgcaaaccccttcctcaaatgcatagcagaaatagtgggaaaaccccagggcttttattatctgggctctcgggcacacagtcagaaacatggcctggggcagcctctcttctctgtgcctttgagtcctgaggaacaaggtcaggcatcaagaataaggaaggccaggatatccaggaggagacctcacgtctgcaccgaggcttcatcagatctgactggaagtgctgtggtccctgtggccaggccagccttcacagggctggggagcacaagccttggtgtggcctgtgcttgcagatggatcctggttgtgtgggggaaggcaggtggcaggtggtggatgctatgcttgagggctgggctgtgtacgcagctcacagtgtggaggtgcttgaaccctggcagttgggcacggttgatagggacgggccttgtgggagaaggtgtcgaaggccagggtgtggctccgagtcccacttctgctagactgaccagagagagcaggtaagagagtgaccagcagcaggccggggtcacttccacgcttcctgcccatcggaggaatgttccagaggttatcccagagagaggtgaagcccaacatggtctttcagccacacgccgggctccccttccccttctgccatgagtggaagcagcctgaggccctcaccagaagcagatgctagagccatgcctcttgtgcggcctgcagaaccgtgagccaaatacgcctcttttctttttaagtaaccctgcctcaggtattcctttatagcaacacaaatggacttagacaatccccaaggcccagacttggagtcccttcttgtaggaagttttctctgctcctccatgactggctttggtgctgccctctgtgtttccatagcattctagatgacccctatcaaagcacatttagcctcctgcttactcatctgcgtctctcagtgtgtttgttttctagcactgctgtgaaaataccatgcatttggtggcttaaaacaatagaaatttattgtctcacagttccagaggccagagtttcaaagtccaggtgttagtagcattggttcctctgggcactctgaggagtgtgttccgtgctcctgccctggctccagtgttgccagcagcgcctggcatcccttggcttctaggtgcctcactccagatctctgcctccgtcttcacatggcgcgctcccctgggtgtttgtgtctctgtgtccagctttccctcctctgataaggacagcagtcattggattagggctccttcaccttaatccagtataacctcattttcacatgattccatctgcaaagactttatttccaaataaagtccatctgcagctctcaccagcagcgagccctgtgcaagaagggatcacatctacacagatccagtgcagtacctggagtacagctggggccttgcgcatgtctgtgagggccaggccaggctgttagagtgtttcttgaaggaaggtgtgcttcagtgtggatgctggtcctgactgggccgctgcccttgcctgttagctccagacagggtgggcttctgtacccgtttacagtatagccgcctgagggaccgtggcatgtgtggcagaggagatctcttgcgcccctgaggtcctccagttatatcttagtcctgcagcttagcaccaatgcctcctcattctctgcctcctctgcccgctggcctcagacatgcgccctaaagatgggagcatgcagtgtgaactggaggtgtaaggggtgaggccgctcccaggacacagcgggcctcatgcgacatgccctggcttctggatccctaagcaccgaggccatccagggaagggctggcctcctccctggctctcagggtgctgtgaatcaggtttggcaggggtctcagcaggggcttatctctgccacagttcagtccaaacaggatgagcagctcttggtggaccagcggtgacccaggcagctcctggtgctgtgtactaggctaggagctttggagggcgtccctccctgcagacccctctctcactgcccatacggctgtgtgttgtcatcatattttggcagagaacctgtcccataaccagagaacctctgtcctgggacagggacaggccccagctcactctgggaacagtcacggtgggtggacgatttgcagaatggtcggagaccctccagcaagaggatccattgttcacgactgcagggtgatttctttgggattgcagacaagggcctcccagtcacttttggtttggtgtctgttcttaacacagttcctgaaacatagaaggcactcgatgagtatttgctgaataaataactgaatgaatatgtgaagaagagaagctgttcatggactagggattctggcaaggtgtggcatggctgagacagcaccagatgagaggctaggaggcctccatcccagacctctctctgctcctcaccagctgagtgaccttgggcaaatgtctttgcttctcttgacctctgtttgttcatttttcttaatctaggagaggagtatatgtagaggattcttttatgttctgtgcatctgtggtcttttgcctgacaagtagaccatttgacttcatatgagcacattccttcatgcattccttctgtcatatttattaaatgcctactgtgtaccaggctaggtgctggaaaagcaagatgtgcggaaacaagggtgcgcagggtctctgccctcacagagcttgtcaggtttgataagagcttacgttcttatgatgccagccaataaacaactggcaacttcatacacaccatgctttcagagcactgtgaatattaataccatggagaaagtaaaggagataatgagatggagagttccagggtaagggcccacctggagcgggtaggcagggagggtctctctgaggaggtggcactggggctgagaggtggtgacaagatgggctggctctgggcagacctggggaggaggctgcgggcaggggacagcagggccaggaccccgaggtgagcagggcccactgtggctgctgctcaggaggggagatgaaggaggatgtgagtggggttggaggggcagacaggggctgaattatgtgggtcagcatgaggagtttgttgtgagtgtgacgttggcaggtctgtgtgcttcccaaggctccagaggagcaggaaggatctggaggagggttaggaaggtagcagagataggcgagggttacggccttgactttagcattcccagagcagttgatgtggttgccagagggcctggccagagctcactggggaagaaagccctggacggtgcaagctgccatttcttgaagggaagtcggtcatggaaacatgtcaaagggacctgccagaagcttctgggacacaaggctcttgtgaggtgttttcccgtctcttttgtgtacactgtgggcttggccatccagccttcatttccctagcaacttctctacatccagatccataagagaaacctttctggtcaccccataagggatgcaagctccgtaacgagcactcaggctcctcgctgatgggggctgcgaggttccagaaggttggcccatgcagcaggccactccttagcgcctctggccctgggtagactttggcctcaggggaaaggagcgtggagacagctgtggacacccagattgctgtatatctgacagcgcttggcccccatctatctggaagtggggtgaggcagactgcattttcaagctcaaccctttcctttatggcagctggggtgggtgaccagccctgtgtaagccataataacccagcctgcatgaggataccataaagcggaagccgggcggctctttgaagggatgacgtgggaagggtatcctctcctttccagcattccttcatttggggagcactgcctccttgggacaagactctgtattggggaggcagcactgaatggggaagtccctggtctggtgggggacagccaccacctggcacgtgatggtggcaagaatgcctaatgcttatgagtgccgcagtgtgcagctctgtgccttacacacgtcacctcccaccatctcccaaggaccgtgtggggtggatcatacagtcaggcactgcataacaagagtctgatcaaggacagagcacatgtacgatggtagtcccataaaactatcacggagccgaaacctccctatctttctgccgtcgtaatggtgcagtggcactcattacttacgtgtgtgtggtggtgtggtgctgttgtaaacaaacctactgggctgacagtcttatcaaagtctagcacagacagttctgtacagtactgtacagtacacaatacttgataataaatgactgttactgatttacgtatttactgtgctatacttttaactgttattttagagtatactcctacttattaaaacaaacgttaactgtaaaacagcctcaggcacgtccttcaggaggtagccataagaaggcattgtcatcttaggacatgcagctgtgtattattttccccgaagaccttccagtggcacaagatgtggaagacagtgatatggatgatcctgaccaaggatcctgatccttgatatcgacgatcctggcctaggctaatgtggacatttgtgtgttagtttttaacaaaaaccttgaaagttaagaaaatgttacaaatagaaaaaagcttatagaatatggataaaagaaaagtatttttgtacagctatacagtgtgtttgtgttttaagctaagtgttattacaaaagagtcaaaaagttaaaaaaaattaaaaggtttgtaaagtagaaaagttacagtaagctgaggttaatttttaattgaataaagaaaatctttaaatttttttttttgttttttgagacggagtctctctctgttgcccaggctggagtgcaatggtgctatcttggctcactgctacctccgcctcccaggttcaagcaattcttctgcctcagcctctcgagtagctgagattacaggtgcctgccaccatgcccggctaagttttgtatttttagtagagacggggtttcaccatgttggccaggctggtctcgaactcaggtgatccacccgctttggcctcccaaagtgctgggattccaggtgtgagccaccgcacctggcctagaaaatctttaaaataaatgtagtgtagcctaagtgcacaatgtttgtaaagtcgacagtagtgtcctgtaatgtcctaggccctcaaattcactcaccactcactcactgactcacacagagcaactttcagtcctgcaagctccgttcatggtaagtgccctatacaggtgcaccattttttgtcttttatagattattttttatgtaccttatctatgtttagacatgtttagatacacaaatacttaccattgtgcgacagttgctacagtgttcagtacagtctcaggcacggtcagaggcctgggagcactaggctgtatgtagcatacagtctgcgtgtgtcgtaggctgtgccatccaggtttgtgtaagtgcactttctgatgttcacacaacaacaaaatcacctaacgacttatttctcagaatgtatccctgtcatcaggagatacaagactataattaggggtaaactttaaaggactttgttgagaagaccattcatgtggggcttcctggatttggttgggttgtggtacctcctctagtgatgcagagccttcctatgatttttctccctgccccaccccaatgcccaccctttcgatttgctatttcctctctccacctcaccccaacacccagtgctatttacatgctatctatatgatgtaagttgtgtctttacttttcagctgcctgactgtgaatttataatcactggtattggtaacagtaggctagttagttggtccagtcaaacaaagatgaactgatccctgctctgttgcttgtggtcagcaccacgtgggcacacaggaggactaatcattcctgtgtaaacgctgagaaaacaactaagacacatggaaaaattaggagctatctgcaggattctgactgtaatgtgattattagaaagccaataaggcagtggttagcatgaattggagtggtagaaaaggatttcttggaagaagccgggcttgagtgccatcttgaagggtgtagaagaattgtctggaccaatggtaggagtgctgggattccaggtaaggaaaagaagagacaccattccatgtgaaagatatcattttgacatataaacacagaatttccaaagttcagtctaagatcattcttagggtggtctgttttcattcattcaacaattacctatcgagcacctatcatgtatgagacacagcagtgcttaaaacacacacagttcctgccttcatagggcatccttctatctaagggagacaggtattcagtatctatttacataattatttattcatttataactcacctctaaaatgtttaggtttggggtgtgactatatttgttttaagttaatattttacgcgtgctactgaaaaaacaaaacccaaactaatgatcactgtatttcatggaagcgggggctgtctcatgaagatgacatttgtcttaaattatgattgaaaaaaatgttttagggtagattgtttgtagagtttttcatcctgctaaagtgatccctaaatcataaaacttgagacttgctgaatgaaagggataaaagagtgaggaggacctacaaatcttcatggggagtagattgtgtctgtttgaagtaaagccacacctgtcatgagggaccaggagaggcttctaggaggaaagagaacataccagggaaagaactgagcaaactttcaaccctctgcagtattagaggtggacaggagggcagcactatattggagagattgttaaactgaaaactcaattagcatgcacaaaaagtatatgtgtttaaggctgttttaactgttggtgagatgctgagctgctaagggctgcctgctgtcattacctattagcaagactttaaattctgacttgctgaagtacgtatttccccctgtagctagccatttctagtaaagcttgtttatttttatttttgtaaaaaaaatggttatagttaatttatccttttggaattggaagagcttcctgcctgaataacttttttttcttttcattttctccagtgtagaattgctggttttggccttttggagctaagtaataaaactctttgtttattctgctgggtctttgcttgtgttagagctgttttatctcaaacatttgtaattctataaattgaaatcagcttttcttacacttgtggattcctttagatttgaaatctattcttggttacgtttatagcttcaacacgcctctcattgtaggtttatacatgtgtttgcttgctcatttattttgtcatcatttgctcattttattaccagttattgagtgcctactgtgtaccaggcactgggcaaggggcattctgtgagagagggtatggtacctgcgggcttaagtagtccgtgggcttgtgaggaaaacgctagattaaatcttgattactgtaaatgtcaagtatggccaagtgtgggatttcgtggcaggagtgagctttcctggaatttgtctttcttgcctcaatttgcctgatagtcatttcatgctagggatgttttaaagtctctggggaggccctgcagtgtagaggaaaatgctgatccacaccagaaatgcgaacctggctctctgcccttgggcaagtcacttaaccctcctgagcctcagtttccatctgtcacttagagctgattatacctacttaacacccaggctttttgtgaggggcattatctcattagagataatgtttttaaaagctctttgtaaattgtgtagcattcaaatggaagttattgttatttttattattgagtgccttctaattcaacactgggatagtaacaaaagaagagaggggttattatcacccctcttccctgtcacgtttagattggggcaaggaaaggttctcaccctcgaggaatttatgatcagactggggagacaagaaccagtttgagaagcaggtaatggtagttgagagaagggatagagggctcaagaatctctccgcgcctttctggctccaaaattctacagtaggagtcaggaaaggcttcacttgtgaagtggcacttgagtgaggccgtcatcagcataggaatcagaatcatctttgtgtgctcatcatagtaaaataaatattgattgagtagcagtatgtggcaagggactcacaaatacattttggttgaggagtcaggttacttggataaaaaatgataatgaatggtacaaaattccctccactggcgccacaggaggggcagccccgggcctgaggtctttgggaaaggtgtggggaggcggtgggcacaggcctagggaagggcaggatttagacgaaagcagagccattggaaaggcatattctgtgtttccactattgacagcctcaattattggttttcccattcagctttctgctctcagtaccccattctgtttacctgctggtgggcagagcgtcacacaaccaaactcgcgtagccttcttcaccctttcccctcttttctgcagaatgggtttgttatgacttgactgtgatttttcaggcctttaatcatccaaggtgaatgtctaagggtggacccaagcagggctggacccaagcagggctgagttaactggacccaagcagggctgagttaggggaagcagggaagagaggggaaggacagcctgagcccttccagacacaggcaaaggagagaggacagacatatcctccctgagagctctccaacccccccaattatcaaagcaaatcaatgtcactctaagtcatatctccatactagctctatcctttctcctgtccctatctctaggtctataaattcagggcttaagggatttctagggaaattacagcaaacgaatcactgagagagggggggaacctccaaaatgttgtgagttgcttgtttaatgtttcaggagcttcaaagaaattgagcaatttagattaaatttcaagaagtggggctgactagagagagaggaaagttagaaacagcgtgctatagaggttgatggtgggaataaactctgctgtttcagccaggccaggcttccttccagtgtgcttctgtatgatgttaataaatgggaaagtgattgacaacttccttaggcaactttggggagtgaaatgccaaatttgggcaaagcagacctctagctttattggtattggggctttgccagaattatctgctattaaatacttccagggacctgttgcctctttgtgacaaatgttagataatttccattaactgcattattgatggagaaagcagaaaggtgagagagtggagagagtaaagattgaatgagtgtcagaactaactggaggaagagggaagataaagatgtgaagaagtatatatctgaggataaaatgtaaaatgaaattaatgaaaatacgatggtcagattggaaggagagaaaatgcaaattacagagtgaaagaagacttctttctactctcaaatgttttggggggattttgggggggcaaataggcagtaggttttcacaccttttgaaaaacccacctcttcacacttgagttttcatgttcttggttcataatcctaggattaccattgtcagttgtgcagaatcccattggaaagcaatatgccatcagtacatctggtaacaggaggatgctaggaatgggaatacagaatatttatgcaacttctaggcttctaaaaattgtatgtttacatgcatatatacacatacatgcacacttatataaaacctgtcaaatttttcaaaaatttttgaaaggattagcattataaagtcataaggaatctctgaagggactttagagtagagaaagatgtgagaaaaagcctaaatatatcactctgcagcaaaccaatcatccacacaaccacagaaatctctgataaatctcttatgaactaaactccctgttgcccgatggttctttttggaaactttgtctctgtctttcgtattgaaatatcgcactgaaaagacctgccatggagatgttgatcccacttatgggcaagagggcgtctgaacttgtcttccagccatggctcaaagattgcagatggaaatccctgctgctcacatttgtatatttgatcaaactcttttcatggccagaccaggctccaggggttctgggtcacatcttccctctagctgccatttactttgatcatactagtaatgattaccatctacagcatgtattatgtgccaggaactttgaatttgtcatctttttggttttcttgggacagggtctcactctgtctcccaggctggagggcagtggcatgatctcggctcactgcaacctctgcctcctgggctcaagcgatcttcccacctcagcctcctgagtatctgggactacaaggcatgtgacactacacccggcgagtttttgtaattttttgtagaaacagggtcttgctgtcctaagctggtctcaaactcccgggctcaagctgtcctcctgcctcgacctccaaagtaccctccctccctgcggtctggaggagttgccttgggacctgtgcttccttggctctatgcactaccagacgcagtccagtgggcagcctggcgggtggccctgggactcattgctttgcagcctgtctggaccatccctaacagtttatttttttgacttttccagtggagagtccacagagaatatgacttttccttgggtcatctgtaaagacttggcaagggatgtcttgcatctgggaagatgtggtcttgggggtcacctaagcagcagaggaaaccttgcaagatgacatttggggctaatgtggaattaactaatagactgatgagtttgcttgatctgagaactcacaaaggatgttgaggaagaaagggcagctatgacctatcttggggttttgcattttgttcttgtgaccctgtggaaatgctcagatgagtgcacatgttcagactcatgccaggccagtgtgaagaatcaagctgagtatgcatccttccgaggctcaaagccaagagaaagaaagagaggcctggtgaaatatcataggaaatgtcacggtcttttctggactctcttaaaaagcccaagacccatttaatatttcgattgcaagacatatctctactggatggtgttttggaaagctggagtttaggaaaatcctggctgtaggaatgctctactgctgtgaacattcccgctttaggaatgctcatagcagtagagagtgggctactgacttttctggttttcaacagtatcttatttttcctgaacatttattaactgtctgccctatcagagaacttctcagattgggacttcccttgagtaagagacaatgacctgaaatgcagggcgagagaaatttctttcagttttaggcggaaggtgggacccaaatttaagagagccaaccccaagtaaggaagatcagctctcactgggagctgtgtaggacccaggggggagcacaccccaggaaagggctgccggtggatccggaggcctgacctggggcccaggctgaagtagaacatcagcacctctagtagcccagcaatttggatagcaggcagagtttaaaggaccaaactggaattatgagtcaagactgggcaggaagcaggaagcaaggatgaggagccaggttatgataactagtgatgcatggggtgtccaggcccagaggcactaaaagggggtcaaggacccagcatggagactgggtaacagagagccatgctgtgctcatggaatctgggcagcaagagtagcagctcccagaggggctggctggcaaccttttgtatcagcttaggaacttttcatgttggtcaggagcagagacgcagttccagttttggctggcctggagcttgcaggataagcccgtgtctggctgcactgtaaaaataacacggagaataggatgggtcttgtccttggtctctagagcagccactacatggaagaaagaggtagaaggcaggtgtctatcaagtgacatcacagaactcaagaggagtgaatgtcacctccattccccagtctcccaacattccctggggaacagggcagagggaagacagagtaggggaattccaggataagcttcatgcacccagaatgtggaatgctcaccaaagaagaacaagagccgtgttcacatcatgatattccgccctcttaattcccaaacagggctcccaggctacagagcagctttgataacagcagtgcactccctctcctctagaaagttaggtggctttaaaataggtaaggctaatttcattccttctgtgagttctgatgaaaggggcatttggcgaaaaacacgtgtgggttggcatgcaatgaatacttatttacatgggtgttttgaagacaatgacacagaatcaaaatttaacccacaagtttaggttttcagtttccttctgcttctctcctttgagaggtagagatggagaaactgtctctaccgctcttattttctcactctgataacaatcttttccattagtagagtgctatataaggtacagtgcacttgggaaatgcctcttgggaaggtgacatgtaaaaatggtggtcaacgccacttctgggcaggtgccaaggcctgtagcagcctgtgtctttgggtcctgcatgctttcctttgtgttggctggttcctctggctgagttcactgttggtctgtctgtggcaattacggagaagcatgacagtcacagcttccctgagttctactgaactcatgaactttgttcataacagactctacaagtggtacaggattcctatggccacaactcaactcaactccgtagaaatcaatgtttatggatcattggagctaaaagaaaacttgcagatcagatcatctcatccaattccctgactttacagaatgaggaaactgaggcacagtaagatttttttttttattttttgcccaggtctgaataaaattgaaggcacccttaccatagccaggattctttgtatataccactggctgaccagtggtagctgaaaaaaaaaaaaaaagggatttgagatggtaggaggggtgtctgactgaggagccatttttataggtttttatagacatttgcattggtttggagtagcagaaccagaaatagtctttcccttttcaggagcaactctgcacagaagactcactggctttggactctgtccctatcacatacatttcagtagccaggccaaggcatctggctgggaggctgggtacgtctcagagaataagcgcttgtcatagaatgggtcgtgaagctgggcagagagccaggtttgcagaaatggctttgtattgatgaagaagggagatttttaccttgtcttggcctccatcatgaagagagtgttacaaaaaagtacagatgacagcaggccactctcggagacacacacgaagcttgtcttcctccatcccaaatacataggtcagtggaccctcaggaatccattctgatgcacgggtggatgagccaagggctgggcagaggccatttcaatagcttaatgcttgccaggtatatctgagctagtgctgccccagggacagagtatcctctgggagatctgaaccaagcgagggtgtggcagccggtggatgacttacagtcagcctatctgggcagattttaaaccctggcgtttttagtgccttgactagtgtgagaaacttgaaactcagtctcattgctatttgtggtaatggtcatttagtttcaggaaaacatcgatggtgcccttccctagatagctgcgttgcaatggaccacattatggcatgcacattaatgtagggattgttcatacaaaagagggcaaagatgccacttgtgacagaaatgactgttacccagtgtctgttctctacctctttcatagggatagaattttcagctgggcacatgactgcttagaatgaagaactacagttctcatcctcccttgtggctaagtgaggttttgtgactaagttctagatagtaggatgtcagcagaggtgatgcgtgtgacttccggtgtgtgcccttgaaggcaaagtcatgcctgccctttccctttctccctctgcaggcgtgttgccgtcatggtgaggagccatttcatatcatgcagactaaaagaccctttccaggtgctggagcaaccattcagaaggcggtgatggctgggggagggcttccatgggagagaggaagtaaatgtctctcatggggaatccctgttgttttggtctctgtcaaccatggttcaattcataacttaagttataccctacttattgggaactttgattttggaaggcaaagaaatttaaaaattaagaaataaaaataaaacaacagatagcacttggataagttggccaagttcaagtaacacaaaaaagtcaggacatggaaccaggaggtggaagtgccttgtttctcctcctcctctttccgtttcccatgtcacccacaggactggtgtgcccggtaggaaagattggtaggtcccactggtcccgagtgtcctacggccctttatattggataatattggaactggattctcctagagattgggaatggtggcagaaaaattaaaattgggaggtgaaagctcaaggaggtagttacaaagcaaaggaaaacaaacagttttgggcatccagctgcctttcagtggtggtcactatggcagagatcagcagagtgaagggctaggagatagactcatttcggatctaactttaataatcaattttaatgacccttgagcgaatggagcagttgattttcctctcaatcctctctctgtgtctgttgttcctgcaaagcctattgggacttgcctgaggaattggcccttatccttgaggttaatgaaagacaacactcaagaagcttcccacttacagaactctttctccaatttagaatggaggctacttttttttttactgtggtaaaatatacataatataacattcacattttaaccattttaaagtggcattgagtacattcatactgttgtgcaaccatcacaaccatccatctccaggactgttttcttcctgcaaaactgaaacgctctacctattaaacaatcagttcccattcccccttcccccagcccctggcacccaccattctactttctgtctatgaatttgaccactctgggaacctcatataagtggaatctcagagtatttgtccttttgtgactggagctagttttggctaagtcatgggagaggcaagtggatcccttgctggtaggaaggacagggccgtgttgacagggaccatgaggcctccgccctgcagttttcctttgtcctctgcgtggggtggggcagccctcttggggaaaaggctctcctcatttcatctttacttttccttcctgggagatggagcaaatggtgcctgccttgtctatttggagcacacaggcatagatcattaataagataattggaaggtacttggcaaaatctgaaatattaactgtctcagagaagctgaataatcacagggtctcaccaagtgccacctcaacaagtgcagctttcacccgtccttggacatttatttccctttgtctgcactctgttccctttctcccaaaatgctgggtagaggttctttaaaattcaagaaaaaaatcagacttccccttctccccagtgacattcccggcctcttctctcactcgagtgatttcctgtatgaaattcaacaacaggtccacccagaggagttctttttcctccagcttctctgtttaaaaatcttgggttcttcctgacaaaaggaggcttagtcatcttcccccagtgacaggccctacttaaaaacaaacaacgaagaaatcctacatcccactccagcttgtgctgcagagcctggccggggagggacaggggatggtacacttggaaaggcaatcaaagagtgggcggtcagaaaacaaaacctgccaggttatcaaaaggacaccacctccaatgcacagagctgcttccttcccgcacacacggaatcttcctgctccctgccccactcatcgtggtcgtggccagctgtgtccagcagcctggcgcccacttaacaaacaggagcaatgagggagactcctcacccggggccagcagtgggtcagggaagaggctggggttagggctcaggggtctcaacctggagtcctgtgtttgcagctacaactccaaggccttgggatttgcctagtggggaatcctgggctccagggaagaagtcactgaaggtttaccaggcagacttataaatggggagaaactgaagcctagaacgcccccctctctgatgactgctgcctacgctgcctccttccttctctcagctccaaaggcacagaatgtctgatcggagagtttagctgctttctactgttttctcacagtttcgtttatcagccttgtcttgccaatgatacagaagctccccgcaggacagtgggtaggtgggagcttcccgatgatcatgttggtgttgacaaagctccccaaagtggggtattccctcaggctggtctccggagccggctctgtgctctgaaagcggcccatcctgccgtcctagagtataggtgccgtctatctctgtgtgttgagttatcgggagatgaaagatttttttcacttggtgaatcctggcattgtgggaagactctcctaacacagacataattctcttgcaatcccacaggcgcacacatacacagaggcgtcacacacacacagaggcacacccctggtgtgtcatgggcgttgttttgcgtggagaacgtggagcgtgaagacacattttctatgacagtggttcccttggtgtgggattgatggacctgtggacaacaggagttttgttagtgctcttcagggtcccggagatcatgtactagaacacctttcctccacagaggaagagactgcaacccagagagctttgtcacttagacacacaattttactttgcttgggcttcagtttccctatatgaaaagaaaaaaaaaatagaattgccccaaaggatcttaaggactttttcagaattccgtacataatgagtttttattgtcattttctcaccattctttggcctttgtggaactgactagaatagctcaattgtttgttaaggaatttctgacctcaatcagttttccttatataaggagttaccagttttagagcctcatgtcacttggggctgtgtctcacttaaaagtgctgtgagagcatattggattgctgaaaggagaaactgaccacctcttagaagacatcaccaattcaaatgagggtgtctcctttcctagcgaaaacgggcacttagactagtttagagccaccggaggtgggaggatgagccagatgtccctggaaagccagtttaggggtgcttttctcatgttttccagggtttaattatgctccgtgcttgagagaaatatttttgaacctgaggattttttatcttaacgttgaacaaattatttatctttctttttctgtcccctccatagttccccaatgactctaatttttattattgttataaagcatttttccttaaagagtaaagacgcaaataaaaaaaatctgcagcttagacacaagaacaagagtgaatctgacagacctaaggttgagtgaaagaaacatggcaaaggggtgtgttcagcaggactccattcctgttaagctaaaaatgggccaaatgaagctatcttttaaggtacacatacatacgtggcaaaagcataaagaaaggtcaagaaatgatgatcgcaaagtcaaggtaatgttgtgtttctggattgatggtagttacatgaaagtatgctttattattcattaaactataaaaatatgtcatatgtaccttttaaataaaaatagaataaagtgacatggaaatcagaaaaaagctagtagcgtaaaaattgcagattcatatggtgggttgaatgctctcttccaaaaccacactaacatgatggtaaaggaatcgttaaaaaatgcataaaccacaaagacaaaatgaatccaaagaagacatcacccaccggtgtttatttgttcatttttttgtatttgaaatactctttgatgacatatttggctttgattctttggcgctggccttaacaaccatacagctgcaaccagttgcttacagggctttgcttttctgctgattttgcagaggccttctccattcctttagtttgaccaacctcagttaagctgatgtgggtgtcaacaaacagttcctcaaccaggtttttctacatagactcatgagggtcagatgcaagtacccgtgaattccacaagctaagccatcggggatgagggtggtcttcagcacccttttgaagcagtgttaatgtccatttctcccccagcagcaatgcctttcttggccatggtggaggcttaaggttggagctgaatgttgaactcactggagatgttctgccttcatgcagcccagtggcagctgggaaagctggaaagtagatggacaagtagtaacagactttgcatgtactgtatgagacagctgaatcctaagcggcagtggggaaaattgagacacaattaaacttgcagctcacaacctccaaaaggcttggaaattgtggtatcaggtatttttggaagtgacggttaaaatggggctaagaactggagaattggttcaacgtttgtattcttagaaaatgctaagagtagatggcacagtgttctcaccacaaaaataataactatgtgaggtggtgcatatgttaattagctagattgagtaattccacaatgtaaacatgcttcaaaacatgttgtacacagtaaatatatataattttatctgtccattgaaaaaaattaattagacctcagacccctactcctattctcagcaactaatactcttcccatttcagctgaggactggaggataaagcggaatgttctctaatggggataaagcaagaggtctgcatgggggcaccactggcacaatggagggcagcacgcccggggcgaatacagggctgagacttctggagtatctcccacttgctctcagagtgctgtcccataagcctgtactctctaggcagaagatctgcgtggctttccctggcagagtggaccagcctaaagaggacagccctaagggggccctaagatctagccaacagggcgttccagctgtggggccttagagcaaagcctagtgcatcataagccacacctgtgctcacaatgtcccatcagtttttggtggttctctcttaaataaggtccatcagttaaggatccctaaatgtccctaaatatcttaggaaggccttgaaaatagaaaccaaagctaacaagcaaaggatgcctatttaaatcagaatatacacgaggaaaacttaaaaaaaacacattattttctgtctttagagggataagatattatatccttgatacagaagctgattgctatgtaaagggaaaaattaaaacattgataattaagaaatgtgatgactgagtgctatgaatggttagaaaacaaaattgaagaatatccaagaaagtagggcaaaaaatcagagatggaaattaggagtaaaaaaaatatgaccattagacagtccaggaagtccagtatctgaatactaggagttccagaaagagataactacaaaaacagaggggaggaaatcaccaatgagacagttctagtacatttgctagaacagaaggatattagtatccagattgaaatggctcattaagtgcccttacaaatagatgaaacaggcctatcccaagggtacatctttgtgacatctcagaaaagtagggacaattggatcttacaagtttctaggctgggcacagtggctcacgcctgtaatcccagtaccagaggcagaggcgggtggatcgcttgagctcaggagttcgagaccagcctgggcaacatggcgaaaccatgtctttaccaaagatacaaaaaattagcgaggcttggtggtacgtgcctgtagtcccagctactcaggaggttgagatgggaggattgcttgagcctgggcgatggagcaagactctgtctcaaagaaaaaaaaagtttctagaaagaagaaatgtattacaaaaggtcaggaatcagcctgatttacccgcagccatgtgggaagctagaaggcgaaggagaattgccctcaaagttctgaagaaaaatgatttccagttgacaattttatatctgatcaaactatcactcaagcaagaaggtaaaagagaaacattttcagataggtaaaaatataaaacaaaaagaaaaaaataaaacttagcccgatgcaccttctctcaggaagctattggagttcttcaccatgaggagggagtaaaccaagggaaacataggatcccggaaatgggggccaacacagaagatggagtatgtgagagggggcccttcatagtcgtgataaagtggatgcaggacattgatctaaactaaatcatgacaaaactattgcagaggatagggaagaggtgaaagagggctaaacccttaccttctatgatgaggaaaaaaccttaaaaatcaccaaggggctacataagcatattattaaaaatatggaatggaataccaaaagaaacagctaaggaattgaaagcttattgttgttgaggggcaggttggggaggggggtaagaagagaactgtggattttttttcttcaatgaaccttttagaacaaattgactctttaaattatgtgtataggccgggcatggtggctcatgcctgtaatcccagcagtttgggaggccaaggttgggaggattacttgagcccaggagtttgagaccagcctggacaacatggcgagaccccgtctctacagaaaatacaaaaattagctgggtgtggtaacgtgtgcctgtggtcccagctactcaggaggctgaggtgggaggattgcttgagtctgggaggttgaggctgcagtgagtgcagtgagctgtgattgtaccagccttggggacagagtgagaccctgtcaataaataaataaataaataaattaaatgtatgcataagagataaagattaaaactagaaaaatgaatagctgattattggtgtttatctcctttagatttctttctttctctttttttttttttttttgagatgggagtttcgctctcattgcccaggctggagtgcaacggcataatctcggctcactgcaaccttcacctcccgggttcaagcaattctcctgcctcaacctcccaagtagctgagattacaggcatgtgccattacgcctggctaatcttttgtatttagtagagacggggtttcaccatgttggccaggctggtagcgaactcctgacctcaggtgatctgcccgcctcggcctcccaaagtgctgggattataggcgtgagccaccgctcctggcctagacttatttcatgtaagtaaaacaagagtcctgtgttgtccattcatttattccacagattttgttttgagtatctgttatgtgctgggcattgaggcaatttcttttctccttatttccccttgttttcattgctcctgttctggaccgtcctgctgggatcctatttaatttgctagttaccacctgccctatacgcctctggatttctgctgggtgtggctgtggccctagtgcgatgtcagggaggtcttacttaatgcttctctcatgctctccagtggtgagttgtcagaagtggtacgttttgctttttcttctgagatgggagaagcgtgctgtatccacagattcctagctggcacagttgactgtttatttgcttagcacatggcctgacacatagcagacactcagtggctgaataaacatggtaactgtgacatgtactcactttctctctcctgtctctgatcctcaaagaggaccaaatatctgccaccctgcatcctcagacggctcgtaactttggcaaaaaggggccaccacagagggcctgctgcagccttcccagttccctgttgtttccacttttgctacctgaaatctaatgatttgagatccagtagtttgcgtcttgaagaatatttggaaattaaggaaaatacaggtgtccctaagaggaaaaatactatgacccatcatcacagtaatttccaacctggagctcccacatgctgggatctcataacaggcataatggtggccagagagcacttcttaatatttcaaaacacctaatggaaactgcccatttatttaagataaggctgcaaagagtaactaaaatggcaagtttctttgctttccagtgaaagagtatcgatttggtatggtagctctggttattttttattttattattattatttttgagacggagtcttggtctgtcacccaggcgggagtgcagtggcttgatcttggctcactgcaacctccgcctcccaggttcaagcgattctcctgcctcagcctcctgagtagctgggactacaggcgtgcgccaccacacttgactaatttttatattttcagtgcagacagggtttcaccatgttagccagactggtctcgaacttctggcctcgtgatccaccctcctcggcctcccaaagtgttgggataacaggcgtgagccaccgcacccggctagctctggttatcctttgctgaacagatgcttgagttgatagctgtctatctgtgataaacacaagaatggaaggagagaataatgatcaataacagcttatgtgattgacaagaccttgccaaaggcagtgtggatgtggtgggatgggaagggggtctctgggaggggagagacgggggcactgcatgctacttagttattcctggggtttgttggcagctgcactgaggacagagggctccagacaggggcagagcaggggcacagagagtggtgtgaggctctaaacgccagcttggtcggcccactttgtcattttgctgagggctggtggaggtgccggtgtggctgtgccaggggccccgcctgtcacctctccctgcaatccagaccccatcacagagcccatggcagcggagataaatgcttcggcaaggcaaacgaatctagagggaatgggagcctcaagccgtgaaaaatgatggggactgtggcctactttcttgctttgtaagagtcacttgcacttttctggggcacagccaaactgacggtgctgtagaacaggatgtgcgagaatgctgtttggcaaacaaagagcgctctctggcccccagaggttctggcttttgagcccagactaaagaaagccaggctggagaccgtatatcaaactttgcaagcccgtttatataccttgctggtgcctcagggggcagaaatgctggttggggatctttgtgttttgttttgaaagagtgatgtttggaagcagaagcactcaaaaatatatcctgacctctggcacttagaacctccaccagagcttggcacttaactgttctgtttctcgtgatatgttctaattatctgtttccagccagattgtaaggtcaacaatggtagtttatttacgagtaagtcttagttttctcatctgtaggaatggggataaaaatgcaggtttgctatgagtgttaggggttcagggtttagttttgggcctaactgctcctgtctacctgtctacccttccagggcctctcaggacacaccttactcccaaagcacaatatccaaatggcaaagaggttgtccctttcttaatgagctccacaagcacctgaccaccaccccctcccattcgaggcctccctgtcccctcccgctgaacctaaaccgctctgaggagcagctctccagccatcagtcctgcttggatgaggatgctgattttgtgtctagggaaacaagtctgccccgtttgccttccacatggaggctgagggtacaagagaaagttgggggaaatagcaagcaaagttcagagggcagtggtccattttttcttatcagccacaaaacaaaaaataaataaaagaaggaggaggccgtgtctttgaggcacagtaagcctgcccactgaatgtccctgagagtaactagttataatagctactccttctacagggagacctagagacggggcagagagaggaaaggacgtgcccccgtgaatagcagaggggtgaacagtaggcctgggggagaaattgccttcctgacaagaagagttggagatgatgaatacaaaacccctgggacactgcctggcccatagtgatgttaccatcagtagtggctttgccgtttccagattgacatccatgccctaaacagagaactttgctgagatgaaatttccttgttggtatacttttgtgaaccactccattgagaaccagcacaaagccattgccttcttgaacgtcttcattaaaactagaataatctctgcccctcatttgcccatgcacatggaaaacccacggatatgccttccctgatggaaaatatgaccactgactggagttcgagaccagcctgaccaatatggagaaaccccatctctactaaaaatacaaaattagccaggcgtggtggtgcatgcttgtaattccagctacttgggaggctgaggcaggagaatcacttgaacccaggaggcaggggctaccgtgagccgagccgagatcacgccattgcactctagtctgggcaacaagagtgaaattccatctcaaaaaaaaaaaaaaaaaagtgaccactgaaatgtgtataatgctttaaaattgacagtgcattttctcatccatcatttgagcctcacaacagccttgtgacgtaggcagtattcgtattctcacttcaaagataaggaagcggatgctggaatggcttgggcaccaggccaggttcatacagtaagtaaatggccaaggcagggtgtaatctttggactccacacccagcgctccttttttttttctgtcatctgtgatgcttcttccaccctgctattgatagcctaggaacaagatgtgtgacttttcttaccaccccctggtgggtacatcctgggtacacttttctgttttctagtgggggtaaggaaaatggctttcagtggtgaaggttcacagaaagaatgggatccagaagcgtcttccagcatggtccaggtgccagaagactttggcaggcgagttgaccatggctgagtcaggccctcctcccccgctccctggattttggatcgattttgcagcggctctggcggctgcatgtgtttcccttggcctctgaggcattccagtgatgatgatggctcggcggggtcacggccctgtacaaagcaagggctatttgtggctgatctaaaacataactggagccacctgcatccgaggctggcttctcgggctctgggtcccataacccagctggagtaaaaagttcacgttcccgtgtggagtagataccaaaagtgacgtctctttctttctttaggtttggctgcgtaattggaaaaccaagctgcccgccaccttgccgtggcttcttctatccctagggcctggagtgggcttcctccctcccctcctctatctaaaccctccttgctgcaagaccctgctcctttcacggagtctccattcccagaatgtatgtgacctcattgtttgtcatccatgttggggcttttaagaatatccccttgcaccattttatgactgcttcatggacaataatcctgactgtgttctttggggccagacactgggtctgctttccttcctctctcacagtgcctggctgtgctgggtacacatgaaggctgacggttcactgaatgaggcattgtggagggcgtagaaaacatggagacctgggaacccagagaccaggttttgttgccagggcaaatccctttgcctctctgggttgctcagtccatatctgtaaaatgagagttgaactggatgatctttaaggtccatttcaaattcaaagttctggaactaattgtagactaagccgaagagatgctcattgcctttacctgtctctctctgctccccatattgcagcctggtaagctgttgtggcttatcacccgcacctctgatttgcctgaatgtaacttaaaaacttgtcttcataatatcaggaaggtcacaaaagagaatgagggagtgttgagtagtgtttagaagcagagactggggaatcagacaaacttgggtttcagtcttagccctaccacttaatagttgtgtggccttgagcaagtcaccttgttaagtaccactttcttttcagaaacatggagttaatgccagtctcacaaggcaatggaggaatatgtgagataatacaggtatggcgcacacacagtgtcagagctcactcaatggtggcagtcatcgtcattgaagtggggaggggaaagaagcagaggggtgtgttttctagtcctttggtgagcattttctgacttgtaaactattggttgcattttaagacagtgcctttatcattttcataagcagtgtaatgatttgaggaaaaccattttagttctaataagaacactagcagtactaattgtgcacatgatagcattttaatagagttccataatttatggaattgggaagacttacaaaaacatgggttgactctctagagtcttaggtttctggtgagtgattcaaacaggctgctcttgcttcctgccagtgcaaataaatcaattgtaaacctgcacttttaaacaaaattgtgaaaaaggaaacaaatccagtgataagaaactattttaacaagacacttcattcttgaggtgatttgctaaggagagattttccagattgtccctgaactaccaaaagcaacagacacactgtggtacttgcttctctttttctagctgctctgggtttaagtaactgaagccttctcaagtattaaatttggagggtggctcagtgatctaagcaatgaagacccaagaaagactttgggtctgaatcaaagttttccaactgccttgctttgagtgcttggaaagtcacttcctaaccttggatacctcaatcttaccaactaaaagagtggtagatggcgggatgaacatcgcccagctttagacagtgaaacctggatgaacttaacctggcttaagatgatccctttctgtttaagtggaaaatgcatggtgagtgaacattacctttcaagcaacttctggacagagtccatatgtgtgtgtgtgtgtatgtgtgtgtattagcctgaagttcaagtacttgcaaaggtttctagcacacagtgtgcagtaggtgagctagacttagttagacttaggacttccagatctcccatgtcttgacaattgtgtttaactgagttttaacattgactctcagagtcagaaagaattccagaagataaaggaaaaccagaaagccaaactttaataaatactcagagagcaaaaagaaataatggaaatggcatacgtgcagagggcacgtagttagtgaagaaatagcttttgatgaaacaggacagggtgaaacttcaaagacttgtcttttatccattaatcccattagtgctccagcgatttctcaaagattgattatctctggggaaatgtgttacatcagccctcagctttccagtcccattagacccagcaaacattctgtgctgctgggatgatgggcttctgtgccatgtttacccatattcctccagcttggccccctcctcaccagctccagtcaggaacagagagaggcctctaccatcagtagtcattctttgggattatcactcacacccctttggaagggaagagaaacataaagataatgggcaagcagcatgtgctcaggttaactttacattggctgatcaattcttcatatagccttgggcgtttattaggactttcatggtggatagacacactgtccccattcaaagtgcctctaaattagaagtgagatacctaaggagtgtcagcaatgaggaacaatgggcttctcttgaagtcttgctctctgtctagtatggtgggcaaaggaatttatcggttactaattttataaataaccttctcacagtctctgttttgtcatatgtaaaatggcagcaatgtaatgtatccctcatagcgttgttaggaggactaaatgggttagtatttgttaaatgcttggcattgtgcctgcctcacaccatacaggcactcaataaaagttagctgaaattatgttaactagtctaagcagaggattagtaggcacgttggaactgatgctaagaaggaataagactcaccttgggaaaagtggggatcagggagaagactaggcagcaggcttctgagtgtgggagtgtgcaggatgtgagcacatctctgcagtgcctgcgccctccttgccacagaaataacctacaccagacgtagtaacagaaaaagaacccaagcattttcaagacaatgtgagcaaggtagaaaagggcgacccatgagtcaacaatactcaagcttttatcagtctcagtttcttcattctttgtttcattcattcaacccacgtttatcatcaaacctgtgctgttgattgatgttatagataaaaatgaaccactccctactctcaagaaagcagaagaaggaagcaggtaagtaactagacaattatataacaagttcctgagtgatcaggaggaatgaagtgccctgggaaggcttctgggaggagttgattcctaagattagatgagtgagagttatctagtgaggggaaaggcatggatgacagagcattgtgtgtgacaaatccttgtctgctaattctcacatttaactcatctcagagtcagtctccattgattgcctattaagtatgggccatatttttatgtctagtaattttggattatattctagacattgttgatggtctagtgtagagactatggattctattatgtttctctggagagtgttgactttttattttagcaggcatttaatttgactgaactcaaacaccaaactatctcctccatggggggcagaagctgaaatctctgatcagttctattaattttagatgggttgcttggaatctgccccatgcatgtatagctcaggagtcagccacagatttggatggagtttatatgcagaatttggagcatcccttctgaggctttctccttttggggatttctgcttccattttccagctgccccaaccatttgctccttccattttccagctgcccttctgatcctgcagatttctatctagtttctaatcactctatatactacagattgggttctgctctcaagcaaaaaactgtgaaacccagaaactcatccaatgctcccttctcccaggttctgcctgctttgagttgctctctagtgcatgcaaataggtatttttaattttttgctaagtaatagttatgttcagatgataggtccaatatacactactctgagatattggaagcaaaactcccacaatggatatttcaagaactgcaagtaggtcagtttgtgtgtgggggggagtgtttgtgtacatgtgtgcatgcgtgtgttacaggggcatggaaatatgcacagcttaaagaaaggcagaggtcagatcatcaaaagccttctgggttatattaaggaatttgaactagatcctgaaggctgtgatggagagctttaatcttaagagtaaaatgatcacaactgttcttagaaacattgctgggcatctgtatgaaggatgaatcaaaagaggtagaaagataggggattgatggggaaacagaattcagtttttgtcctctggaagatgaggggttgaactagatgatcattaatgtctcttatggctctagtattccgatcttcccattaatgactttacttggtcctactgtagccaggagttcccacaaggctgttttttgcagagcactatacacagcccttgaagcccaggctttaaaaaatgccatttagtgatattttatggcttgtgaatagattaaggtaatggaggcacaaaacaacacaaatgaatgcaccacgggtgggtaacagcctttgaatttctccagctctcccttcagacctcctgtatcacaacaggtatttggtcattttatgtgatcttaaatggcctactattaacctgactttgattttttttcagtcctcagagaggtggaggtgggcctagcaagaacccaatgctagggattcattgcaaagtgtacccaaattgggaagggtgagaagctattctatgatggtcttatgagaacctcaggagatgctggtggtggtgtgatgggcatgttggtttcatcctttcctgtttctgaaccaataggaaaatgaggcttcctgagcctcaggatgccctaccctttctaaggcttcctggagagcaaagagttcctgctctgccctggtgtgagtcagagactgtgatgacacactgaacagcaacacctgtccttgctggggaggggatccaaagtccagccgctcgccttcagcatgacacatttttctgtgctttgcctcgttaagagctcaggtcctttagtgcttgaaagtagctgagtgcaccacctctgtaaatcgatcccgcactcagttcgtgaaacatcaggttttaggaattggagaggcagcaatataatttttgtgtgctgttgcttgagtgaactgtaaaccaaggctttctacccaggattgcacggctttttactttgatgaatgtcattttactcagagctgactaaatgatattgtcttatatggctctcaaatttttctctgatctgttcccaatctgaaacgtgtgagtacatcacttcagatatttgctaggcatctgagcttggcctgaggatattcaccagcatgattgagaaaacatgcttgtcctcaggaaggcccaagtctaagcacctgctcatgccccttccttggctgtgtggcttttctacgctgcaaaccaagcttgtagacatggtgtacctttccataacaggtctctctcttctgtcatgttgtggtcactgaattggatttggcagaaataccagaaagtggaacatgtggtcgcagcatgtgaccttcaagtcaggtcacggctggcatttgccagcctctgtttgttggttctggtggaatcaggcctatgtgtggactctgctcctactatttgagggcattgtgaggccttttctgagtgtgtctcctgcctccttgactccgggcctgaagtttctgccattgatgtaactcatatgtgttacagcattgcctccagaattctcctatttgtgaaggcctattctgttagaacaggttgattgaggagcacattacctacttctggtgctccatctggggactgtggacagcagaagagtggggtgaggtgagcttgaggggttgagggagagtgacacagaagagcagggctggctcccctgaaacaggaggctcccctgtcagttgtggcaggctctctgcctggttttttccactcctttatccccagcacttaacctcatgtttggctcatagtagatgcttaggagatgaaagcctcatgtccaaccatggccaacagttaaatctgtgaatctcaggcttgatttcagcttggccaggtctgagtcattaaaggacgctttgcatttttggatagtggaacttttgccatcttattctttttccatggtgtcatggctttggcatgatcagggttatgaaaaaagggggataagccctctactctgctttacctgccgtgactgagatcagacactggtttttagagggaaatgtccattttagagcaagagagagaagaccttaagcatgacctaaagaaaagagagaggccaggctgtcccaccacttcatgcttggttgactgagccaagtttgactgcaagactgggtcttggcccaggatggagaatattcactaatgaggcaattgacttcaagaagatcaaaataattagtcagttttcactgctatagtgagtcacccttgtgaagacattatgttccaactgaagagtgagggagttgaggtggaagtctcctggctcctgctccctggggagtgcagagtgtgtctagaagcctgggctggtaggccatggagtggggacctgagctgtttccttctgcctgtgctttttctctttcctctcccacgttcactgggaagcaaggaagttgaggacacgttacctcagtacgtaccacaatacgcattagaggtctgcttcctaggcccgtagattctagggagggcactccaggcctgcaggggccctgaggcaggggttggtgggcatgagaatgggacccacccctgctgcttgggagggtatgtgttgcccttggaggcagggagaagggctggtctgtccctgtgcttgggcactcccatctgcacagtgccctgtggcagggagagatggcctcagagcctgtggttcctttaccgtggatggcttttcacgtgtggggctggattgctgagaacatcttttacctggcggatccctgaataggtgaggtggactcgggtctggaaagttaatttacatcttttctgaaggccagggaagggcaggggcagcctgacctgtcagggcgatacagtctgtagctgtttggccagagtgagaggagtgtctgatggaacaggacttgccttggaactgagcaaactggccccgtagagattaagccttggacctttgttcgcctgagtcccccaccccagccagctcacagataggaggctggagaagggagtggggtggatcacacgccatccccacatgctctctgtgggcctgttctctccacgtgcgaggagggatgagcattctgcagggagtccgtcaagatgagtccatggtggaaaagctcacagacggggaggtggggactccacagggttccgccatttcctgggaagggaaccttaggaatgtcacttaaactctttgagccttctttctcttctttcctccctcccttcttcgttttctccctctcttccttttccccacaaatattttctgagtgcccatcaggagttgtaaatgctggaaatgcagtgaagaatagcatagacaaggctggtgctatggcaggaagagagggaaaaatgaagcaaacagctaagtcagtcagactttcaaatacgggtaagtgctttcaagaaactaggataacaggtggagaggggcatgcgactatctcagatagcagaggagaggaaggcctccccgagggaattccacttgggctgtgaccctgtgataaagagccactcatgataggtctgggaggacggccactatgcacagaggcagcagcacatgccatggccctgaggagggaagaccagtatgcagatgaccacagggccctatgggaggacagagaccagtctctgaaccgagctgtgggagagcgtgaatgcagggttgttcctgctttggaccgtggacaataaataaactcctattgtgcctagaaaccgcctcagtgttggggtgtgtttgctgcagcagctagtgccaccctaacgactgcagtctaatcattgtgtgtggcagtacacacaggacctgaagcaaccaggagcttgagcgcagggaagtaaagctcattatcacctcagcaacaggggccctgggagaaccaaaggcctgctcctctctgccgctggctgtttctgctagtctgagccagaggctctatcctgctgtaatgtcagtttaaaaggcagcctttccagactcttgtcacatcaccaggagctcttggtcctctaattaagtagtaatgtgcttgtccaataagtgccatatggttgcaatgaatcaaacccaaattatcttagctctaaaaattaatattactaattatgataatctcacaattttatgtctgcttttcttctgaagagctcaaaatgcaagtattaaaataatatgtccaaatatcctacattaggaagaaaggaggacccacggagaagttgggaagatggcatccaacgttaagataaggctcccgtctttctcttgtctttatctctgacttcataaagatagctagtctttcctggcaataagccagaatagtgataggattagggaaacgggattatcttaacgtcacagaaaggagatgaggcacaaataagggaatgaagctaattagatactgcaaaatgccaagattggagaaaactggaatagacttaccctgatggaccttgtctgtggagaacggatatagggtgggtccagggagactggccagccttggctggggcctcatgggaccagaagtggcagtggacagcagagttggtgaggagctgggagggggattcaccaggaaggactgagttctgaatggcagggacgtttgcagacaggagactggcgtctgtccaggagagagcagggcttactgtgagcgagggaagcagtgggatgagtgtgtccggcggtgtctcttacttaagagtgacaaaggaagagtgcaggagtttccgtgtttggccctaacccaggtccacttcactgccctgagagatgtagtgggatgatggaggggactgggggcagagtggatatttaagtctgaggggagaagttaggaaagggttgtgggtcacagaattagagagttaccaaggaaactgcagagaccattacttagtcagttctccatttccaggaaggtttgtcaccataggaaagaaattcattaaccttttattcaacgggtattaattggctatcatgtgcttttcttaccccacaagagcttatgatggaaggtgatcatacaatttatcatccaaattgggatacatttgagaaggaaaggcggcagattatgtgggaacaaagactggcccatgccagctgggacatgtggtcaccttacttatgatctatgagatgtataatcaccccatttgttgataccaggtgcagtgagatgcatgctctatgtgcagtgtgtgttttcaccctgtatccccatcttctgctgggagcgggactccctttctccccgcctgagcctgttctcctcagtagcaggatccagctcaagccctacccccacctgctccaccacaactgccccactgccaccaccactaggcttgctccttaacctttctgtgcctcagttccctgatcagtaaaacggggctaactatagtacctactactagaactgtgcctgactcaaagtaggcaccagatgtgtcctgctatgatgatggggagccctgtgatttggtaacttccccaatctctctgcacttttgtttcctcatgtgggaatcagggacaatattacctaccttttaagggcctggaatttaagaaaaattagcccccttcccccttagaatcagcagcagacatcaaagggcgagttttaatacttcccacacaagttcacagatttattacataatatgtttagttgtggttaaagaacatctaaggggcgaaggagctgcccaaggggaaggaggcagacgagagggacatgtgtggctttgcatggaaaagggaagtggtatcccagataaatggtggccagccttcgagggctctcaggcaagagagaaaactctagacatcaccagtgcctgggctttgttgcaggcagaggtgctttctctagaagggaaagcaagtccctatagtcataaaatgagcagctcttcagctgctagtacttgacctccaaccagaattgatggggtgctcagaactattctaggtactttgaatttttttaacctcattaagttcatctataagacaggtagtttttatattttaaaatgattttataacagaaaatttcaaatgtaatcaaagagacatagataatgagttcccgtgctccagcttcaacagttataaacagttgctgatttggttttatctatttccctcaagatttttttttcttttctgggatgtttggaagcaaattccagcaattatataatttcacctgtaagtacagtttacccttgaacaacatgggggttagagatgctgacccttggatggtcaaaaatctgcacataaattttgactcccgcaaagcctaactactaacaatctactgtttacctgaagcctgactgataacataaacagtcgatgaacacatattttgtatgttgtatgtattatttagtgtattcttacaataaagtaggctagagaaaagcaaatgtcattaagaaaatcctaaggaaggtaaaatatatttactattcattaagtggaagtgaaccattgtaaaggtcttcatcctccttgtcttcacattgagcagactgaggaagagaagtaggaagaggaggaggaggagggcggctaggtcttgccatctcgggtggcagaggcagaagaaaatccacatgtaagtgacccacgctgttcaaacctgtgttgttcaaggtcagctgtactttggcatgcatctctaacagacaagatttaaaaaaatatatatcaccaaatgcctctatcactccagacaacaataacagtaaaacgcaagagatccttaacatcatctaatattcagttcatatgtaaatttcccttattatgtcgaaatatctttgccggttggtttgaatcaggattctaataaagtctacacattacatttgcttgtaggtttgtaaatctctttttatctatgattgttccccctcccattttgcatgtcatttgtttgttgaagaaactaggtcagttgtcctgcagaatgtccctcattttgatttggttggctgcttccttattgtcccttaatttattccttcatcctccatgttttctgtgacctcggagttagattcaggttccgtttgttttgaagggagggtcaaggatgtgccagctgtggttatgccccttcctgttgtgacactgagatgggtgggtgggctccgggattggcagcctcatccttcatctattactgaggccccatcagcctttcccctgatggttttcacatccattgacgattgttgcccagatccattatttcattagggcttgaaatgctcattttctgattctgtcattccttttgcgttgagtagctggaattcttctataaagaagaacgctctctcatcaacagtttggttaccctgaaataccatgtggcagaaaaagcaggacaggtgctttctcatcacttaccggctttcaaagtaatgagttggtcccttgcaaaggaggataggtctttaattaattgattaaacaagtatttattgagttcctgctatatgctgggtatcgttctaacatcctgatggttcagcagtgaacaaaacagataaaaatccctgcattcttggaatttacattccaatgggggaagatggatagtgaacaaattggtgtgctatatatttagttcagggatgatacaggctatggaggaaagcaaagcaggacagggacatgaggatgctagaggggtgggatgctagaggatgctaggaatttgggtttgcaatcttgaatagggtaagcaggctcaggaggtgacatttaagcaaactcttgagaaggtgagaaattgctggagaggagcaggccaggcagaaggctggagtgcgtgaggtagggatgctggtgtggagcccgtgtggggaagatggtaggagacgggcctagagaggtggttgcaggggcagaccaggcagagtcttagaaaccattttcagggccttggttttcccctggatgagatgggcagccctggaggactgtaagcagaggtatagtctgactcacgtttttaaagggtcctgctggccgcttggggagaagatggagaagtcaagtaagggtagaactgagtttaggcttgaaagcagagagccttcagccctggtcaagcttccttccatgtcagctagggcctattgggggggttggagctggggggcagcaagtgcttcacctgttcctaggggttctctgtgcatgtggcattacaggaaatgcttccaactcaatcccgtcctttaaaattcctaggcatagcattctcgagcgcttcaggacataaaatcccggagcagaaaccttcctccccgagtctctaaacaatggctacatgtccatcaccccagagaactggaattccattttatactgaaagtgggatacacgaggacaatgctatcacttgacccatcttctttcatggttggtggtgagtcttttggaccgtctttaccatcactgaagaattggcattggctagcaaggcacattcagggggaacttctcatgattccagaactcagcatttgtggtgggatcggccatcagtctacggagggtgacccctccacccatggccaggtcggcttaatcaataggtgtctgatggcataaggtgcagagcaacagggcaccttttcctttccatccagattttcccagccagcttggagagcactttttacccaggctgccttcccaacacccagagagcccttctgtggatgagcatctctccttgcctgtaactctctcctatcaaaggctgctcgtgaatttctgggtgcttagcaaccaggagaggggacgatacaagccgcctctatccctgtcaggtagctgctcccgttgttcgtcttctcctctgggtttgtatatgcagtgaaagtagccagagagacactccacctcaacttaaacagcaacttcctaaataaataaaaaatacacagaatccagttcaagcagatcttgcctcaaagacagcttgaaagcatcccttctcattattccctgcctgatttccagtgtttctctccctttctttctttctctttcttttcttgtctttccctccctccctctctctttcttccttcctctcctctcccttccctttccttccttccctttccttccctccctccctccctccctccctcccttccttccttccttccttccttccttccttccttccttctctctctctttctttctttctttctttttctttcttctcgctctgttgcccaggctggagtgcagtggcacgatcttggctcactgcaacctgcgcctcctgggttcaagtgattctcctgcctctgcctcccaagtagctgggattataggcttctgccaccacaccagcctaatttttgcatttttagtagagatgggattttgccatgttggccaggcaggtcttgaactcctgacctcgggtgatccatccgcctctgcctcccaaagtgctggaattacaggcatgagccactgcccgtggctgatttccagtgtttctatgtaaccctctgagattcccacaagcctagcatgaagatgagacacaccaagggaggtgaggagctaggagaagggcaggcatctccaaattgcaagtttcttctcaaactgcagatctgcagagaaaaggaaggacacagtgaaggaagcagattctccaaggaagggatatcaggacttaggaatggactctttgcctcttattaaaaggaaagttgcttgctggggaagtagcagattatttcaaatgggtatccgtccttggtagccaccaatatccatcagtttaacaggagaggaaatagagttgtcatgccaggaggattttggaggagccagcggctggctatcgagaagggaagggagctagcacttgctgagtttcttcaaggggccatgcactaactgtaggaagcatggactttgctttttgcatgggatgaacctaactcagagttgatgctgcatgtaggattatgtttttccgacaatccagggatctgcagaaggcttgctacaggatctgagcaggagtctaagcagttgtcttgtggtatcaatgctcctgtgtctggagagctggtcgctaagacctggagtctgggccccttgtgggggtgtcacagaaggctgtgaacacctctctgctcctggaaaatgccttcctttcctggccccaggacagactctccgacttccttcatgaccgggttcccactcgggagcctttggaaccgcttgagtaccagattattaacaggacccgtgattgtgatttcttcccccgtacaaattcacagaccctgagaagaaaaggagaagataggctgggcacagtggctcttgcttttaatctcagcactttgggaggccgaggcgggcagatcacccgaggtcaggagttcaagaccagcctggccaacatgacaaaaccctgtctgtactaaaaatacaaaaattagctagttgaggtgacaggcgcttgcagtcccagttacccaggaggctaaggcaggagaatcgcttgaacccagaaggtaaaggttgcagtgagccgtgattgcaccactgcactgcagcctggttgacagagcaagactctgtctcaaaataaataaataaataaataatttaaaagaggagatagatgtgatggcggtcttttctgtacttagaacaacctaatagttatttaatggataaacaggcattaaaatgaatgtttgatgacttggaatccagtcttttataaaactctcagtgttctgtgattccaggcactcatggctgtggcaggcatcctgccaggtggagctgggagttcagcacagaagtaagtcggggaggaggtatgcattgccacagacttaggaagtgttccctggacctgctgatgataggttggtcttagccatgttcctgaacaagtaagttgtctaatgaaaggaaaacataccaacctgttagtggagttagcaccctagacccatagactctaaggttggaaggacttttgaagtcatctagccccttgccccactcgatgcgtgattaatacgcaccacagaaactccgggctctgaatactgaacattgacccagacccctattgcgttagaaaatattattgcaattagtggaatgctgctagaatattggctccagacctgagtctcaaagttggaagagatttagaaagaaggatgtccagaggaaggaacagacatgagtgaagttggaaaatggagactggcaaagagtagctcgaaaaagaacaaagtttcctaataatgaccacaaatgagtatttggctgttcaatggatatatgcttgctccacgctcattggatgctagcctgctctcaggaagagctcttgccttcctgcctccaaaccactgtacacaccgttgctagattgatctcccaagaatcagcttctaccatgctctttctctgcttcaaatgaaattttgatcatttctcttcatctgacaggtgaaaatcaaaattttctgagcttggtcctcaaggcccttccttctccactcatcctttggccaggcaggccctccaactgcctcctgagcagcctcactcaggtctttgctcatacttgctagaatggagagcacgtcttctcgttccctgtaaccccaacagtgtctgttgtaaggttgagcacacggtagatggatggatgaagccttcattctgagtaaacacgcatgcaagtataaacacatacctacacacagaaacaccacacactcttaagtgtagatgaagagaaagaaccctttctttcttccctggtgtctggcaaaggccaaaggggtggtggggaaagcattaggatacagaggctctggttcttgttcctccctggaactggcttctgctaggaagcccagcagggcctgagtgctggcaagcctggcatggagccctcctgctttggaggaagcgaaatgtcccagcaggatgagtcagtgggagaatggaaccagaaagtgagtcattttgggagcagaggctaaaggatcttctctgctcaaagatattttaggtcttggtaggttttccccacttctcttgtttagatataagtttggggcatgtgactacagtggctcagttcccagatgtaatgctgagagactgtccagtgcgctgcgttctagaacatttttgctgatagggaggccgtaaagtgaggggctggttttggagccaggcagattgggttctaatcacagcgtgtcccagaatcagctggggacctagagtgagttgtttaatctcttaaagtatagtttttatcattttcaaaatgagggttgttggaaatgtcaaatggttgttcagcaagtgtttgttgagtccctagtgtgtgtctggcacagagctgagtgcagagtatggggtgctgaatactgcagccacgcatcctgccctctggggacgggtgcagcttgggattgtgttatatttgtagcagttctgatgacaacaagaataaaataaaacacctggatttgtttcatgaacataaccctcaaatctgcactcccctattacgtgtttgggcaactgagttttggaacctacatatcagactcaaatgttttcttctggggggttacagtctggggaagacccctgtgtaaagcatgtagcatagtgcctgtggacaggagagcccagtccgtgacggcggtaacaatgatcattactacctctgttatttcctgtagccaactgacatctttgcacctctgtttcctcatccagaaaatgttcagctgaattgcagtcctttcacagaggcagttcctgagtctctagtcttggggctcatgcttgaagttatttagagaatctctaagatacaagtggagagacagctggaaggggcagcacccaggccttcagtgtggggacagagttaagatcaacatgatcacagcagactgacacggcgagctgaaacaaacaggaaaacatttgagcctgatgttaggttccaaaactcagttgctgaaaggcgtaataggggagcgcagatttgagggtcatgcccatgaaaacaaatccaggtgttttattttattcttgttgccatcagaactgctacaaatatgacacaattccatgctgcacccacagaatagtgagtagtgtgtaggccagggcaagaaaaagaagagcaataatattctagttattgtaggccaggggacccacatccacgatatcgtttttttacagctcattactgaatcctcacaataaccccatggggtagatattactgttattacccttttatagatgagaacactggagcttagcgagggtaagtaatggactgcaaggacactctgtctctggcccagaggaacagctggaggatgcaggcaagatgtgtgttaagggggtcctgcagagtgggggtaaactgattctggattactcattaatgtagaactccgaccagtgggtggagggtatgggttcaatagggagctcttcagaaatggaacatgttgagaggccaggagttctccatccctgaaagcattcaaggagaggttgggtggctgtgggaggtattggagaagggattttaacatcgggagggaactggggagattgtgtgtgagtttctgtctgcaaaaaaaaaaaaaaaaaaaaaaaatgacggtaccaaccttgaacccatgtaatcttcttcagtaatattcaagcaagaacagccaccataaaattgtgtgagcaaatcaggtaatactggtgaaagccaaacacaggctccccgttgtgtgagtgagaacatgacattgttacagtgatgggttcatgcaccctggggtgggtatgctgatggtttcttctgcttctgcttctacgaggcccctctcccaatgcctttcccaaatctctccttatggggtttttttccccctcctaaaccaccttaaatcgaaatccactcacatttgtagccatttcacagtctctttgcatattggtgagccctgtcgggggtcgctggtatcttatagtattgatgttacaaaatgtaaagttactttggggaaatgacttctcttctgaagcttttatagggagaaggtggtgagcttacccctacactctctcctttcctttgtctaattcctccacagaacatttgtccggtgctcactgtggactggaagtgtgctagggactgtgtactgcaaggtgactgggatgtgcgcctgagcatccctgagtccaaggtaggggaaagaggaagtggtccacgatgacactgtgatgacggccatcctgatgaaggcacaccccaccctgcagcggctcagggaaggggcgcgtgtgcagacatcttgcaggcagggtttagatggtgctgtcctcggaagagaggactttggaagaaggtggtcttggtttcggtccttagtccaccggatgccaggtaatccttaacctttctgagcctctgttcttcacctcttaaatggggatatcacttcccccagatgatcttttattttgtttttaaaaaattattatttttagtatttttaatagaaatggggtctcactatgttgaccaggcttgtctccgactcctggcctcaaacaatcctcccatctcggcctcccaaagtgctgagattataggcgtgagccaccatgcccagccccctgacgtgatttctatgaaaatgaaattaaatgagttaatttagggaagccacttaacataattcctggctcaaaaaaaaaaagaaaaaagaaagttttcttcccttcctgaccttgtaggagaacagagctccttcgcctgaggggcatgagtccctatgcagaggttccctaacacctgctcataggtctgtgtcccgctgatctggtaagcaccgggaatggtctcttaaacacaaagtttgggctgccttctctagagattctatttccacaagtgtgggaaggggctgcacgggaatcagaaatgtttccccagtgattctgatgcatagttcagtttgaagacgtgctaacaatatataccaacaaaagttgtctgcgtctttttctggggacagacccccccccggctttcatcagaatgtcacggtcccacacaaatgaagatgcatcctctcatggtatgtgctagcgggcacagagagtggggctggagaatgagggcttggtaggcgaaaggccccagggccagccctgctctgccctcgtctcttgccttcccgccaggtgggtcaggaaataggaacaggtggttagtcacggggctctccagcaggtagggcagtggctgaggaaatagcggtatctcatcagctctgtctctagaggttcttaagatacttagttgtcaccagcctgaaaagtcagcgtggaaaatgttccagcctggttcctgtaaacgtaaaatctgttatgaattatatccatccacgtggaagagggagacagagtgatctggtatgtgcaggagagggccagcctctgcctggtctgaaagcttttgcaattgttcctaattggcccagtctttttctgcaggaatctcctctcttttctccatcccatcccccactgcctgcagcttctgatttcttggcaaggcaagcaggcaccagagctggggctgcggttgttctgaaggattttcaggtgtgcgtgttgaaagccggcaggaagagaatgctggctctgtgtttagcagccgaagggacttgttatttaatgtgtcttctgaagccacgaggcctcggctttgtaacttgctttctttattcttataaatcttctaggatgctccatggactgtaggaggagctctgacttcccgaccatacccttgtgtttaccactacagggacagaggttcacagctgcttctggttgctgtagatgatctggttccctgataatttgagataagtttgtgttagtttggagtcttcggtgaatacgttagggtacatgtttcttcgtcgttcctggcagggctgatcatagaccacatcaacccaagaatgtgtttgcctctctgatgaggctacatctagaatatgaacttgtcgagtgcttaagtatctttctacatagtttattcattagcctgttcatttatctgttcaacaactatttcttgcttgtcaaccatgttctaggcatgtcatgggctctggaagcagagtgagaagcaaggctaagtcctgggctcacggaacttaggttctaatgaggaagacaggcaaacaaggcgccgtggagaggcaggcagagaaccttgctttccaaccctgctcagaggtgcagtctctttatatatcccacttccgctatccccaaacatgcccattagcactgacatctaaagggctcatggtgaattaaaatgtgaccccacctctgggtatttagtcatttagtattgaactggggttaaagtcctaaggaaaggcatgtggagctaatatttttggggggacaggccctactggcagccatggaatcttactccgcgtggctcattgctcctgggctttacaactcaacgcagctgtagttcattcaccatgctgtggccaagcagcaggagttcaaatgtccccactgccatctccaagttgtctctctcgggttcctatttccctggcttttgtcactcccacctcacctgtggcccacattcttctctatttgaatgtgtggcaggcaggcgagatagacaatggggaggagttgttctgcaggagagaaggggacagtccttcctccagcctggagcacttcctgcaccgctccccaccccgtctactctccatatcccaccacgccctcagggccttgccctaaccccggaagcccacctgtctcttggctgaaatcctatgggctgagttgggtccccccaaaactcatgtgttgaagccctgtctcctgtacttctagaatgtgactgcatttggagacagggtctttaaagaggtgattaagttagcatgagaccattagggtgggcctactccaatatgattggatttataaaaagaagaaacttggacacagacacacatggacacagacacacatagaaggaaaagcatgtgaagacatggggagaagaggggcaactgcaagccatggcgggaggcctcatgagacatccaccctgctggcaccttgatcttggacttccagccttcaggaagttcatttctgttgagtaagctgccctgtctgtggcactttgtcagggcagtcccagcactgcctcctgccctgtctgtgtggccctgggcagaagcggcctgggagtgtcactcacccttcctcctgcaccacgtgtctttgcccggtgggctccagccgcgcctgggcagcagtctagacttcctgcagtctctcaggcttctctgtggctgtcccgtgccgagcgcccaatgcacacttgtagcctgattgattggttttctcagccagggcacggatcgtttcctggccgctctctggctccttttccaggcacctcactcggttccctactctgaggtggctacggccagactcgcctcagcagctgcctccactacgggctgtggtttttggtgagcttctttcagtcctctcatctttatgggaaaactgcccagcccaggaccaattagcgtgggatggttgcaataaaggtctcccttcccgacatgtggccagcacagagccttccctggttccctcccggcatttagtcacagtccccagctgtgtggtcggtcctctcggctcatgttatgggtggccgggaaggcaggctgtcttgggatctaggcccaagtgactaggtccattgtgggtgaggcaaggtggccacctctgcatcctcctaggggtgtcctgaagcggctgcgggccatgggcaggtggccgctgagggggtaagggttcctttcagtgtgaaatgtgcctgtacccaagagaacttgccttcacttttttttattttaaagaaatgaagggagaaatagagactaaaaaccctgggggtcagggtctgtgagacaaactgagatgtgctggagacattgcttatggatttattgatccctgacttgttcataccatgtgcctggaattcagcacttacacgtttccatagcacaatggacatcagtttaatcataatgggatttcttaagtgattactatatgccaggtactatgctaagtcagttatcaacacgacctcctttaatcctttcgacaatccgatggggaagctctcattagccccacttgccagaagaggaaactgaggctcagagtaggttacatgactaaaagagcaggggctctgcattcaggtctgcctgacccagagtgtattatcttaaacatatgtgacacttcttgcttgccttcctggtgctgcaccatctgtttttccctgtgaggtcccctttccccacaaactggctgtgagcacacccgacccctttcctgtcctgctgcccccttgcctgtcctgctgcccccatccctcggtgctcagcttgttgccagcagagtcaaacacacagactcatggtaaaacgttatcttacatttgtgtaccttttcatgttttcagaaccttttccaggcagtatctaatttaatttttaccatcattctgtgagtgaatattttctgtcttatggttggggaaactgaggtcagagaggttaaatgattgcctggggtggcactgcctagcctctgtgtggtggagctaggacccagtcgaggctcggagttctaatccaccagtctaccctggtaggaacctctgtgcaaagccagcccccatagcagcctctctgtcttgggccaaagatacaaatcagcaacggccaggaaatgatttgcatgaggaactgaggtggggcggtgggcaggagagaggctgaggcagcaagggacagagtgggcacacagaaacttccctctggaggcctcagcctcttcccaaggctgagcatctgcgcagggcttagtttgttcattcctgggagctccaggtaagtctccctctcagagggaaaagctgattcttccaggcaagggtgaagagacccacctttctgagtcagtgaccgacaggccagagggctgaagatgtgggcactgcggtgagaaccggagtagccaaggaagcagggtggtccccacaggggcggcgattggtttgtggggtccctgcctgtcctccggagaaagattactaaggagcaaaagccgactttgctcggtgacccctcctggtgccacatccctcatgcctgcagcagaaggtggggggctccaggcccctgacaggtcatcctgatctcagagaagagtctgctgcccccaggacggggactgagctgagggcgaggaggatgccaggagaggcaccttggcccctgctgtggtattggccacaggttgggagctgcctttccccgaagccctagctttgcttctgtgagaagcagacacccagcagcataagcagcctgcctaggaggcttttcactaggaattaaaaacaccaaaaaggaacttcttatcagcaggtaccctaggggccacatggactggtaagtggtatcttccccatggtctcttaaggcctctgaagtcccagaccctcagatagttggcaactctgcctttccgcatatcaaacatctgaaaatgcatctacctcgcacatcaaatagaatatatttgctataacacaattgggaagaatggttgtattttttataatgttgagttttattaagaataaattattcattttagtcttgcaacataaactcttattctgatagataactatggatcgagatgcatttgactagttggcacaatgttaatttttgtagatgttgtgtgaaatatttattttgattttctagttttatattttggacccaatctagttttgtttctgattttcacattttttttcaggacagtgaaaaagcttataggatataagagttgaacctattgcacctaatggataaaatctcttctgtctctccccatccccagagagagagaaaaaataaaaataaaaagagaaagacactgtttcagcaaattgatattcggtttttaggcctatattatacttgggtctcaggtcctctaatctcctatttggtggtatccttataaaatacaagaagtgttctctgagaaatgtggaaaatttctgacgatcccagatgatactaaatcagttgccccaaatcctttagaagaaggaagaataaggccaggcacggtgtctcacgcctgtaatcccagccctttgggaggccgaggcaggcggatcacgaggtcaggagatcaagaccatcctggctaatatggtgaaaccccgtctctactaaaaatacaaaaaaattagccggccgtggtggcgggtgcctgtagtcccagctacttgggaggctgaggcaggagaatggtgtgaacccaggaggcggagcttgcagtgagctgagatcacaccactacactccagcctgcgcgacagaacgagactccgtctcaaaaaaaaaaaaaaaaaaaaaaaaaagacacattcccaacgtgaagcatcaaacagctcagcttttctaagtgttgggagaagtggagaacactggttctcctgggatggtgcctgggttagcaccattgtgtggatctggtgtaacctgatacaggatttctccccttgcccagtaagagagccttgtgctagatggatgcagcgaggacagaggtcccttgctggctgtgtgtgcaaatattgagcaccaaatggctaccagaggaatggggaagaactgactcgggataagagtgggatgcgtacaaggagagaaggctggagaaaaccttgcacgctgcgggagcaggctccccaggacgtgtcagaagggcccagtccatggaaacagggagacttgccatatgggccatcgtggctgcctgtgtggggactgaagctgggcgctggctgctgcgcgagatgagggggccaggtccagcttccaaagggcagcttccaggcagagggctgctaactggctggaaaactatcagcgtgtggagtggaaacctgtaggggcagggaaaccaaggaacatttggccatcttccgccattgtgatttacctgccataagagaagctaaagtaaaacagcatgaagttgtggccagccccattaaaataacgtgctcattaagggctcttacaactagtgatatttaaagaagaaagaaaaaaactcacaaaagtacttgaggcaattatctacagcaaaagaagatgcagatcccttgagatcactgacgcaagagaacaaaggaggtcccaaaagaggctgcctgtgatccaggtgagagccgaaaccttcaaggctgggtaccagtgcttcttacacctgagtgaagcatcttgggacatgccttgtggttcaacgttaaaggaatagcacagccaaccagaacctgctctttgttaatggaatggaatcctctttctgcactaaaaatgagatgatgtgaaatcctttaaaatttattggaaggagggagggctttttgtgcatgatgcgttaccaggaaatgacactgtctctctccttattgcctaattagcaatgttgtacttctgtgtgaaatggcgtgtttaaacattgccaatcgatttaaacaaaagatttcaaaatactgtaggatggagcacagtgaaaaattccttgccagccagcgttctcccaggtaaggtttttgtcattcaaggtgtggctgcacagcagggaaggctttgctcatccccgccccgcagtgccccattccctccatcagccgtttatctagcattgggtctggttttctgttttttgttgtttgtttgttttaattttttcagggtatcgtagacgtgttgggttccactaggccctgccagccattcacttatttattcattacgcactcaatgaagacataagctgtgcattctaggtgcaaaggacgtagaaatgagtataatacagttcctttcctcaaggaggtcaatccagtgggaaaacaggtgtgtttgtggaaaatggaaatacagccggcaggcgaggaggctgtagagagaggagcacagtgctctgagtagcctgtctgctgtagcaagtcacccccagcagctggtggcttcacagagtaaaggttagtttcttgttcacatcacagcccagcttggattggtggggtggcaagaagggttattcagggtctcagaatacttctgccgacaggctgtgccatcctctcaggccttggaacccgcccccttttaaacccctgagtctggctgacagataagggcccaagtcgcacccatgttttagggtctaggcctagaaagggtgccagtcatttcctgcaagtcccattggctgggactcagcctgtggccctgccttgtccagggatactgggaagtgtggtccagtgccgtgcccaggaggaagagcaggtgtggtgcacgtcagccatgtccccactccacggagcagcccgttcaccctggggcgtcaggagaggctctgtcagaggggattttgccagggagatgtggggtgtggggtgctggatgtggggtccaggagagcaggggcatgagaagagcagcaacccaagcaaggaagaggaaaaggcctggatgtgtcttcagatagagacagactgaagcgccggcccacactcaccagcagcgtggctctgggcttggtccttaggtgtcccaggtgtctgtctccgcacatcttcccaggccttctccagcgtaccggcatcacctggggactggccctctgcagtcacgctggctccaggctcaccgggagtcacgttctctggctgtgactttccttttgctgtggattaacccagacatgggcctgatgctttttctttaatgtatacacacacatacactcacacatacacacatggacacattcactcacatgcactcacatgtactcaagcatacacacatgcactcacacacatgcgctcaggcacacatgcactcacaggcacacatgtaaacaggcacacacacgcacatgtactcatacaggcacacacgtacacccaggcacatgcacacatggtctcatacaggcacacacgtacacacaggcacacacatgcactcacacacaggcacacctccacaggcacatacatgcacatgatctcacgtacacaggcacacgtatgcacacacacatacacaggcacacacatgcactcacacatgtactcgcatacacaggcgcacacgtacacacaggcacacacatgcacacatggtctcacacaggcacacacctacacatggacactcatacacgcacacatgtactcacaggcacacgtgtacacgcacgcacacatgtattcacacacatacgttcacacatatacacgcactcacacatacaggcacacacatacacactcaggcacagacacacacacacacatgcacgcacatgggcgcgcacacacacaccccctccctccctctcacggtttttggttcagcctgcactcaagtttttgggaagatggagctgacatcacagtaatgtgaatgttgaatatctgaaacttctgtgctgagaaatcccctcaggcctttttgccaggttggctgctgtgtcttcctatatttcttgccctttccacctctcccactttgctgctcccaaacaactcttaacacccaccgccccctgtttttgttatacagagcagttcagccctctccagtccccacccctgagctcagctccaagccttcttctgcgcgtggattcccgtgcctgcggactcacagcaggccgggccggctcacgtgggatggaccctgtctccttccacagggagaggggcagtaaagacgtccatttcccatgctttgaaggatgtcactgtctcagaaggcagaagctaattgtgtcggttttaagtactttttccttttatgtttaatttcattaaagttaattttcccttatgtgaaatgtgaatgctgccatcacaactggaaagttgtcgtgagaattaaagatgataatgtatgaaagtgtgtaacacggtacctggcactccccccactctccccctcctccacacggtacctggcactccccccactctccccctcctccacagagccctggaagacttggcggtgctgtgatacgtgtagtgtgtgatggggagcggtgagggacagctggagagggtgcgctgagccagagtttcatgctgtgtgtttttccgaggaggtgggcctttgtcctctgcattcagagtcagaagagagttcatcaggtacaaatgggaagagaaccttttaaacagctgtctgtttgagcagatttccccacctcggattcaagatgtcattccatgtaggtttgcatttgcagggtacacccaggagaagctgttagttgctgtgattccacacctggagtgaggggagaacatcatggtttcctgccaggtgtgctggggcttactggccctgccaggaacatctggttgaaacttgtcacgtcaaggccgggtgcagaggcccatgcctgaaattccagcactttgggaggctgaggcgggtggatcacttgaacccaggagtttgagatcagcctgggaaacatggcgaaaccctgtctctacaaaaagtacaaaaattagccagacctggtggcacatacctgtcatcccagctacttgggaggctgaggtgagaggatggcttgagcccaggaggcagaggtggcagtgagctgagattgcaccattgaactccagcctgggcaatcgagctagaccctgtctcaaaaaaaaacaaaaaacaaaaaacttgtaaaggttccatgcactccttccctgtagaggctggtgttgagagctcgccacctttccttctgtttagaggtaggaagagaactcaggcaagcgatgagcaagccgtctgaattgagcaagggccttgggttggaacccttctctcccctgctttcctggtatcacagtgctagactgggcctctgcagcccacccagccgaggaggcccttctcctacagcagccttgacaggtctgtctggcctctgccctgacacctccagggctggccatctatgtggggaagattatgattggaaggaaggtttttcttagagctgccagtctttattttctacctgctgctcttcattttgtcctcagaggaggaacgtgtcctctcttccctaggacgtctgtcttggtattgaagacagtgcttctgtgcttcttacttatcttccttgaggttagccatccttgtctctgcaccctctccctcagtcctggccactcccatgtgaacctcagtgtttattcctgacccaggatacctcagctccaactggaccccaggcagtaagaggcttcctcttagagtcagcggattcccactgatgcagcccaagattacctgccccgtcctcctcctcctgctcctcctctggctcctcccactctccctcctcctcctagtgcttctcctcctgttcctctcctcttcttcccctcctgctcccccctgtgttcctcctcctccttctactccttttgttcctcctccactgcctcctcctcctcctcctcctcctcctgctcctatccctcctcctcctacacctcctctgcctcctcccgttcctcctcctctgtgctcttcctccctctcctcctcctccctgctcttccccttccccttcctgctccccctcctcttcctgattgtcccctcttccccctcctctgagcagccatattacatagcttactcacgttgaccttgtgctgctggtgagctttgtttctccctttctgttcatgtactgttctttctcttggatattttctgccaaatgtttttcattgatgactttgctcttgggtctccttgcctatcttccttccttcccccttcctgctctgtgacattcttgtttacataccctctccactgtgagcctggtatttcagtgactggagaagttttgggccttatctgagctgctttccttgttatcacttatgttccagcagctcgatccatcttcccatgcaggaacgtttctccccaaagtcctgaccctgccgtggagcacctgaggggaggagtcactgggtttctggcctcagaggagcacagtgttccccaggacttaccctgcatccgtattggaatatctgaaaatttcatcactgttgaaaataggaatgttttctgatctaaggtcttctgaggacattggggacactttattcccaagagcaaacactgactaggatgtctttttggctatgatgggatctggtagaaagtttcaagctactaaaatagggaatgtattctaatgttgtcttgaaaatgaatcaaatacacttccctgaatgaaagaagagatgtgtgtgtgtgtgtatttaaatcaccgatagcagcagtgatgatggtgacagtcacccatgccgtgcctggcaccttgctaagtgcctgcacacattgtcagttggtccaggcggtaagtcatgaggagtgggttttagtgtcccaaagcctcagggaggttaaggcatgtcctgatcacagctggaggacctcaccacgcccctccctgtggaaggagggattcttccgcaggaaatggagttttcccacagaacacaggacaggcagggaggaactcactggggctcatggctgtgctactgctactaccactgggcaaatctctgggcctcagtttctcctgtagtaaagtggcaggattgaattggatgcacttaagtaggtttccagctctaaagatctatgatttgttgtttcccttatttcagtgacaagttcctttggaaaacattgctgtcacaagaaaaaatgccatcatcaaaatgtcttctgatgttggacaaactgaatgggggttaggaaaccacttctgtaggaagcaggggtagggatgaaggcaaggaggacagatggatgagcatcctaaacagaatagggaaataattttagaactgatttttcagggagtcgcaagattatattactctagctctcgctctgcacctggaattcgacagtgcttaggatagggaatgtcgaaaccgggaaggggcttcccctcagccccaaactcagaattcgtatgtcagatctggaaagggaccacagtgaccacttagtccactccttcattttatgtcagcatccctggagatcccagcctttgggagaaaaagactcctgaggccacgtggtccgagctcctggagcatcgctggcagaggagtgttcagatcagatggtccccagcctgtgcaccaagtgtaccatccctgctaagtagatcttagtggagcagggcttacttcagggatgtggagcttattgggatccttcagcctctcttccaataacttctgctttagagattatgatgtaactgatgagaactgtcttgagacttccttttgtacttaaagtggatggggcaggctggtttagggcagtgtacctggggcaaggagtctggggtccttctgttggtttaggaagctcctcttgtctgtctggcctggatacttgtgatttgccagcttagtctaacagttaaccacctcttagtgggaagtaatgaatccaggattctctgctacgctcaggtgataaattgtgataaagtcaagtcagaatttcccagcttaggtgttgtgaaagcccaaatgaggcctgataagatattttgagtttttcacacagaagtaatttatagatgattcccaacttttgaactgctcttttatttattattaagttggtgtttcaaacttagaaaactgcaaatggcatttagttttccaggctggcctgtttagtgcataacacagctgacacactatatggttgccataaatcataatggaaagtagtatttttgcaaatggataatgtagaattgcagttgcagactccctgaaggccttcagtggttccagccagcacatgaacacatttacactgaagcgtaaaagacggttgctttatgcatctttactctgctgtgagggccatgaggagcaagaggtcactgggtgtctgcaggcagtcccagggaagcagcgaccagagcagcagggtttagccttcttatggtcatgggtgtgtgcagccacacgacctcctgaaaaactgctcctgggctcttcagaactgccccagaccaagggtccagagttgttaggagccaggggggctggggaaagcgaagcctctagggcttctcagattttgaggaggacagaacctgttagccacctgccttttgctcagaaaaggtgggctggagctgcccagcaaagtaaatgcaatgcctacctccagagcctggctttccacgaggtacaggctggccctgaacacctgcctccttccaggtgctgtgctgtgcttttgagatcaggagtggaagctggcagaaccaagagaatgcaacacactggcctccaccttggcccagaacatacccaccacgccctcgggaagtttaaatcccatcactctctctgctgcttttccctgttacagtgtgtaaactgagattccacacttggaaatgcatgtgttcctctctgggaagacctccttgctgcccccatccccctgcatcttgtgtccactggatcctctcattgactgttgacaatgctcagtttaatgccaggcagcgtacattcagactgtaccccaggaaatctgacacaaactgtgtttcccattgattttaaaaattaagactcagtgatataatgtcacttattattatgtaataaagccctattatggctagtaatttttcagtgactagctgaattttacttattagtgttcatttaagtcagcctgtaatatgttcagtgcaagtactaaaactgcctttcttcaaaaatcagaaatttgacattttttaatcagtcaggacttccttcctttcccctcctccaaaaacatccagagaagtgagattttctcacatttaagtcaatgattgaatagaaccaaattgggggaagattaatttttgaaccagtaacaccaaactgaaattaattttactaatttcaaaatctgacagttttgaggaccctttaatagaaccagagcttctgaaaataagcacctactgatgggttcagtgcagaaatgaacccaggtctagaactgcagtgttaagagatgatttccaaacgaagctgtggtttcatttggaacgctttcttgatttacatgttctgggttttgtaagtttaattcaaatttattttctcctaaatgcatttttactaccggaaggcccccgtatggaaatcaccttctctcattatgcagcttgcctggcccagagggtgagcgggccttggaatgaggacacccgccctggctgggagtcgaggccgagtttgcatccaaagctgtagcacagtgcggcccacagcaaagggcatcctcaggaagcaaggtgcttgtgtttgtgccttcgtcctttaagacaatacccagatctggcagcatcttctgcagcaagcaggagctgattacctggagctctgcctgcctctctccccgcctctgcctccccccggagaggcggcttctgaggaggctgctgttggcggccaggagaattccttgtctctgtggaaccggaggcctcccctctgcggctatttaaatgtgttcctccggcatgaggatgactcaccgtttaacaattaattacagctccgcatattgtaggcactgcacctatatgggggtgtaatctccgtgcggcaccatgttgatgagctgcttctccacatcaccaaattgtgaggacttcgattttaaaaaacagaaattgaaccaggcttggaggaaaaggcaaatttatacaatgcctttgatatgaattctttttattttcttctctgtggcttgcagtttccaccagggtaaagcaggcagaggtgggaggtggggagggagagacagggggttctggctaggaagggaacgggcaaggaaactgcccactacgtgctgtcacctggtggctgctgtggccggccctcattcccaccacatcagagagaggcataataatcttaggtgattttttttaagttttcaaggtgaggatgcattttactatatgctaatttttcttaatcatatgttatggtttattatcgacagatcttttaagaacttttcctgcagtaaatatttcaaactttataaattaagtattggctgcataaagtcctgttgcctgagatttgttgcaagtttgtcctttttgagatacatcgagtggctccaagtcatttgatcatgatcgtgtccatgatatcttgatagacttttaagcgtgaatccccctgatctctgtcttgctgccttccccacaccatcccctcaactcccctcccagccacgaattatacttcctcactacccaatttcttttggtaccaggagagggccactcttgttctggcctcagggacgttgcacttgctacagctgactcttgaacagtacgggtttgaactgtgtgggtcacttacacgtggatttccttccatctctgccacccctgagatggcaagaccaacccctccccttcctcctcctcagtctactcaatgtgaagacgatgagggtgaaaacctttatgatggtccacttctacttaatgaatagtaaatatattttttctgccttaggattttcttaatatattcttttctctagcttactctactgtaagaatataacataaaatatatataacatatataatatgtgttcatcgactatcctgttggtgagccttctggtcaatagtaggctatgagtagttaagtctctggggagtaagaagttaccttggattttcaactgtaagggagtcagcgcccccagtccccacattgtttaggggcaaactgcattccatcttcttggactgctcttcccacaggtgttgcccccctcccttttcctctgtcaggtcccagagcatgggttaccaccacagagaggcctctgtggatgcctatgtaaagtggcaccatttacttcagccgagaggtgaaggctgccgtgaggcaggaccatatcactgcactcagtctgggcaacagagtgaggccctggctcaaaaataataccaataataaaaaaaagtgctaccatcctcccagctcctcactcccaggaatcactcaggagcccatggttctgtcttattttgttcatcgcacaattactatctgaaatgatctcatttatttacttattttttgtctgcctcccaccagaatgttctctgttctctgccgtatccttagcactgagcagtgcctgcacatggtgagcactcgacaaaaatttattataaggatgaatgaatggatggaccctcgattctgttattattatgttttaatccagacaacactcaggagtttcactgtatcagtatatccattaggaaggttagtaatgtgtaaaaactctcctgtgaatgctttcattcagtactcagtctgtaaggggtaaatccttcagcagactcttgaggagtgtttaccaagtgtcaggcactattctagagcagtggctctaacctagggatgattttgccttccaggggcagctgtcaatgtctaggaacatttttggttgtcagggtgggtggtaggttgctactggcatctagcggatagaggccagggaagccgctaaacatcctgccatgcacaggacagccccacaacaaagaatcatctggcacaaaatgtcaatagtgtcaatagtgtgaggttgagaaaccttgttctggagtctgaggatacggtggtgacagggcaaggctcctactcccatgaagcttatattctgttgcaggaaccgggatagatacacaataaacaaatgagattattctgggaatgacaagggctgacaaagaaagcaaatagaatgttgcgatggtagctgtgggagttacttagatcgacggattggggaaagctttctgagaggtggcatatgagctgggacccctccagatgagctggaggcaaccctggagatctggcagaccctaccaggaggagtcagacagcaagtgctaatggggaaggggaaaactttccaaaggttctgaggtttaggttggtttcaaagagggccattcactctggggcttgaatgtgcttttatccaatgaaggtagcctagacatctgtttgaaaaaccattagattagtattcttttttgcaatatctcgttttttggaaagagctaagcttcctaaaaaacgtatttttctagacttcagagttccttaagagtggtggtttatctttctgaggttggctgccatgttgattcctcctcccctttcccagaattgggagtcttacagctttgtctctccactcagtgctcagagaatcacacacacagtcccaggataggacattccaaaaaataaagaagggcacagagaaggtgggggaccttccccgcaacttagccgcagttggagattcaataattgagcctgaaagatcactttaatttcctcaataatagtttggtgttcttatgtgttaggttataaagccctaaaacgcagtataattcaataccattgtgctacaaacccactaacacttttttcttcactgcccagcctggctcctcctcttaggagtcgcatgtccatacagagtcccagagaaattctacatctttctctgtgttctcccagactgaacagaagactggaaatgtcttcccttaggtctttgctgccaatctgggaaatgtcaaaggaattagcttttctttctatacttctagcatgtatttatcctcgctataaatgtcactttttttactgcttgtgtgtcagtcaggttgcttttggctgcaagtgtcctcatgaccctaacaacaagttactgtgtcacatatcaagttctgggagagggaattccagggggaacaggaaagcgtgtcttccttgagtgaggaaccctctccaagaaccctccagcagactccgccatgcttcattggccaggggctggccagatatctctttagcagggaagatgggattggcttgggtgaattgtgatgtgcctccattgcttggggagaggtgacatccaaacaaaatctgggcactcccagcaagggagaaggagggagtgcttctgggtaggcaacgattccaactttatcatttgtcttcctggcaaggactcagaagatactgaccatttatatttttctggttcttcatcacatgcaagaatgtcttttgttataatgattagagaaatgataatgatcgtgggcctttgtttccccttgcctgagctgggccttcacaatgcacaggcattgcttttgataaattggattgacttagaggattttagacttggaaagccttaaagaacagccagttcagtctttgtctttccacacagggacactgagcccaggctgccatgtggcctgcccaggacctcaccgcttgttcagctgaggcccgcacgctttgggtgcacaggctcttactttgtgtctttttcctaatttcatgaagcctggtccccgtttgcctccagctaatcaatgctattgtacacgtttaggtctttatctcagttgaaacctgcaccagaactggagaactaagtagtagtcatatatagctcagcatgaatattagatatttcttattttaagtcttctcttgaatcatttaaagacatttcaatcacttattaacaggtatggaagttgttttgggggatgaggaccttcagtcctcttcttggtccttcagaaccacatcatctgggtggtgcctcttctgccccttcctcctcgaaggcagctctgccaccactaacagccacagaggagaagaggaaggggacttgcttcacgtgggaaggagtgtctcacctgaagcatccttggacgcttatttaatttaaaaatgtttcatgagcaacttctgagctctgttgtcctcttccccatgagcggagggtggaatgaggcttgaggataaaggaccctgggccttgagaatgcttcaagccccggagatgaagttgtctgtctgacagaggtccccaagtctgcatccaaggagaggacctctcttctctatgaagagatgctttgcttctggaaacccaagtacaatcctagaaacctaggagctggccatttgtacaccgaaagttttctttttttctgtgtgaatggaatccccatcaggatcctattaaagttctctggggaatttagaaaggtcttgatttccatgctgggggtgtagccatgcataccctgtctatagtgaaacgtacatagtattttccatgaagggaagtgcctgcaaactattcaaagtatcaggccacaggagcgaccagccaggactgagaaggtggtgtaggatgggatgtccgcctgcgatccatctccatgctgtcctgtcctcatgtccccataggaacagttatggacattggacttttccttcttacagtccccctcagttgtggtgctgttggcatttttgcagggactgttcgttgttaggggctgtctcacccactgaagggtagaccttggttaaggttaaggatccttgaaggtttaggatccttggcttttacctgcattcaattacccacccaggtattgcagcaaccagaagtcccgcaccagcttctcgccatctcccgtggagcagactgctctgggcctctgttacaggacggattaggagtcaggattctggaggtggctgcagtcctatggccaagccggtacctgtacctccagggatccgcattcttaggagggttttctgaatgtagggaaagagagcaccaggggacactgctccttcagggtcacccaccagcccctcatggcttcactcagccaagaagcacattgtatctccttggggccctctggcatctcctctgccttcatacttggtcctgggttgcatgcatttgggatatgttttcacaccagagagcttgctagacagagcccaaggggatggaactgagtgaagtgacctataggcctacttctggccaaatctcagggcccaggtccccggcacaggtctttgctgcgtgtgatttctgccccttcatgggggaccaggaggctctgcagtcttttggacattaaatgatgcttgcaaaacaacaatgtgatgagttaggaatgaatcagaagcagacgagggacatttaaaacctcttagattacagtcccaccaacagtgtaaaagtgttcctatttctccacatcctctccagcacctgttgtttcctgactttttaatgatcgccattctaactggtgtgagatggtatctcattgtggttttgatttgcatttctctgatggccagtgatgatgagcattttttcatgtgtttcttggctgcataaatgtcttcttttgagaagtgtctgttcatgtccttcgcccactttttgatggggttgtttgtttttttcttgtaaatttgtttgagttcattgtagattctggatattagccctagttcaaccattgtggaagtcagtgtggcgattcctcagggatctagacctagaaataccatttgacccagccatcccattactggatatatacccaaatgactataaatcatgttgctataaagacacatgcacacgtatgtttattgcagcattattcacaatagcaaagacttggaaccaacccaaatgtccaacaatgatagactggattaagaaaatgtggcacatatacatcatggaatactatgcagccataaaaaatgatgagttcgtgtcctttgtagggacatggatgaaattggaaatcatcattctcagtaaactatcacaagaacaaaaaactaaacactgcatattctcactcataggtgggaattgaacagtgagatcacatggacacaggaaggggaatatcacactctggggactgtggtggggttgggggaggggggagggatagcattgggagatatacctaatgctagatgatgagttagtgggtgcagcgcaccagcatggcacatgtatacatatgtaactaacctgcacaatgtgcacatgtaccctaaaactttaataaaaaaaaataaattaattaaaaaaaacaaaaacaaaaaaaaaacctcttagatactcattccctcatgctcacgttcctccccaaagaacctcctcccttcccagggagagggtcttggccacatgtgtgggaggctctgcaaagccagtgagctcttccacccacagcagtcccagggccctgacattcctccttccctttcctggttgccagactttctagaaggaagccatgtattcgggcacttctgaagggctgggtgaaactaggcaacagacttctgcacgttacactgggaaagccagtgtgtggaggtgcagcgtgacctgaaccagtcctgagaggccaggtgtccacacttggctgtggggcttggctggtgggggcagggcatgtagcctgggtacagggaggagggggactgcccagaggcactcactcttaatttggctttctcttcgggtctcattatgtgtcacttaatgtgaaaagtctgctttagactcctattctaaatcaccttaacctttcatcttgccctgtggtgctcttggctcctatagcactgaaaacaatgtgtaattctatatttatttatatgtttattatctgtcacccccagtagatggtaaactgcatgagttggggtcctgtgcattgcaagtgctggcatcttagtagctgcagaatgaataaacagtggcagtagcatcctctccggctgagtttttagagtaggaagtaggcagaaggtttggggtcatcttagtttgctcaggctcctataacaaaataccgcagtggggggactacaaagacggaaatgtatttctcacagacctggaggctgggcagccccaggatcaaggtgccagcagatttggtgtctggtgagggccttcttcctggctcgtggacatttgtctcctcactgtgtcctcatatagtggaaggggcgagggagctctctggagtctctaagagtgttaatctcattcgtgagtgctctgccccatgacctaattgcctacgaaagcccctcccccaatatcatcacactgggggctaggatttcagcataggaatttggggggacacattcagtctgtcaccatgtacatggactgtgcagtgggaattaccctgatttgaggagtgtttagggagggggagggcgagctggacagacctgggatggctccgcgtaaaccgtgtctgcagcatcctgggagcctgcttgagatccggcccttctaaggagctccaggagacttacaacccagcccttggaaggagatccagagggaagaaggccagttgatgacttatgaaatgtggatttgtattttcagaagtgcagagtagtattttaaaaaagcagatgagactctgagggttgggagaatggcagagcatgggaagtggaggctgcttcggatccgagaggaggcactgtgagatgtggaaagagcttgggctttggaatggaacctgcatttgattctagatttcaccgctgagtagttatgtagcttttggccaagtcacttatccagtctgagactcagcatttttatctgcaaaatggggctagtaacactgccctctttgagttgtcatgaatattcaatgagatgatgtgtgtacccacctccctacctactcactgtccaatgagtgtttgttctttgttccttttctctcttgaatagccagcgtggccagttttaaatttctcttgctctccaatctagtctaatttattctgtcagctgtcacatctactaactaggtagtccataggtgcatattatatgcatgtaatggacccattgttgtgtgaagggtggtgaagatttaggagcacagatttatcctgcagaccatctcccacatgaatgtgttcctgggagaatacattttggatttttaatacccatgcttcgtattttatacacatattttaataaaatgattttaagctgctgtttatataggaaattatatttacagcctccaaatgcaatataacattttagtgaaaagtcttgagttacatttcaagtacagttgatagaatgtgggaatctcttgtgggtgttgtgtagagcccgtcgagtgtcaataaaggggacttgctttggggatgtgtctgggccccaggaccacattcgaggagcatctttcccttcccaaggcaaggcatcttggctacatgtgttggaggatttgcagagccaggatttgggggatagaccaggctgctttcccgacccatgacacacctggactcttcccttccctttttctggctgacagtcttcctagaaagaggtcatttgtttggcccctccatggggctgtgtgaagtcagctgacgggcttctgcacattaagcggagaggtcaggagcacgttatattcattgtgatagtttgtgtgatagttctactatataatagacattatgctgtattttgttacttttaggaaatacatgatgaagtgttttggttacattttaggaaattggctttgagttgacatgtaatgcattataatttttcttatttaaaagatgagaaataggccaggtgcggtggctcaagcctgtaatcccagtattttgggaggctgaggtgggaggctcacttgagctcaggagttggagaccagcctgggcaacatagcaacacctcgtctctacaaaaaaaagtaaaaaaaattagtcaggtgtggtggtgtgcacctgtagtctcatttattctggaggctgacacaggatgattacttgggcccaggaagttgaggctgcagtgagctgagagttgagatcgtgccactgtattccagcttgggtgacagagccagaccctgtctcaaaaacaaaacaaacaaaaaaaaccatgagaaattggctagcgtttcccacagaacatctgactttcgggaaagtcttattgatgtgtgccttttttacaaatggtccctatcttcaaggcgtggatagtgtttttagggagacagaacaaacaataagaatggagcattcatataaggaacataacaaatagcacaaggaggtacgcagccaaattagtggacctttgaggacggcagggctggagaggatgggtagcaaccacatacgccatggctcttggaatttcagactttagcagtttctcaatgaatgttccttaagtacctgtcatgcacaggtgctgtgccaagtataaagtgataagcaaggaagcggaaaacgtagcatgatgcccagcctgaacttctctatgtctaagaggaatgagaagacattaaaaacacacagcacaacatgattcaaggtagaaaagttacaatgtgctaaaagagaagaacagctagacaacgcactgctcagagaggggagatgacgtgcacatctgagaggttgctgtggctttggctaggacagttatcttagctgagatggccttaaggcaaggtcttgatgagggctgcccatgttattaacacctggcactgcagtgcccgttagagtggatgccgccggctgagggagctggcaggctctggagccctctgtcccctaggcataaatctgctatgcagtgcattggagggaagctccagggacctaaggaaggatgtctgggtggtgggtggcatttgagggactcagggcactgatatttaccaacccatacagtgttttactgtttaatgaccagtatgttttaccatgcacagtagctgaagatcagcccaaattggaccccaggggtaggtaagctaatgaagccagaggtgtaggctatccatcctcttttgtcccaatccaggaaatgtattttacccaataacaacagtcctgtgttcttggagggtgttccacctggcgtaacctaagggtctaacttagggtttaagtaccctacattgaaataatagagaaacctgtgacctgaccactctaatgattctaatcaaagtgctccagcactgtgatccctgccccagacccctgggcctcacccccatccagtaaatagagggtttgtgcatggcaaagctgagggccgcagagccccgcgccagctctcccggccagcagcgtccatgctgatggtggtgtttgtgcagcacctggtatgaaatcttgtagctatcacccccctggttcccatgcctgccacttctatcagtaagacgcagcgagtcacacagtaccacagtgaagtcttggttttggatgaggtatgtgattataagaatttgtttttataaaaacaataatcatcctaaaaacctgtgtaagcctcccctctgcaaaccagtatggtctgaaagaaaaccaagtaaaacaaacaccaacaatccttatgaacaaaggagtgggaaggggtatgttcgacggttgtaatagtaagaaactcacggggaggagtcatagtgtgcttgaagtttggtggctctctgaagacaaatggcgctccatctgtgtgaaagggagcgagggagtgggggaggcacgcccgtggctgctctgtagctggggtgctgtttcataaggtggttcactgactggtaccaccgtcacacagcgccctattaccagttgtttacccaagaataaagaatccgaattatattttagaaatacaatttagggagctgaagtttaaaataactatcttgagcttcagaaagctcatctctggaaaatattcacagagggatatttgtacttccaagggaatctgatggggcaagaagcaagtcagatttctctacttttcagttaatggactccttaaagattatgttcgtattcctttaaaatagtaattgctttgtttcctcaagagccaagatccatccagtccctaaatcaaattctcaactaaaatcagaaggtttaagatacagttattttaagtgctgcatactcttaaaaatgtgtgtctggttatgttgtgtatataagtggctcatatcagagatgcagcaagtcaagctatataaaattcagtaacacatgccagagaaggaaggagggaagagagagagattgaaagagagaaagagatgcttatccttttctccaggagaggctcgaattttactttcaacttgtttctaaaaatggcagatgcaaagtaagaaaacaaatgtatctgttgcaggaaggaaggaaggacagagaggggaatctgatcttcagcctgatgtgatatgtttttatctgaatgcttttgcaatagaacatctgggaggcaagtgagaattggggtatgcctatgtttcaacagtttcattagggtcacagacctttatttcccagggctgtgatagaaaatatgaactcttccatagttgggagttgaggaaggggtaggctgaaacagtggcatctgtaacagtgcatgccatcagtgggatgtgatgatagtgcttatcacaatagctttaagacttatgccctctttctttggaagcatttaaatagctagccttgtttctctttcctaggaggaagcctgggattgatgttggtacctccaacctgaagtctgggaaattggtggggggtttgttgactcaagtttataagtggatttttaacccagttcacgtggtgcttgtgctgacactgacattttgtgctgcatgatctggaagttgaggcaaacattatcaatgttagactggcagaatctgagaggacagggtcccagtttcaaagtttagaaacatttcattgatcaaagtgtattagagaaaaaagcattaagttaattttttcattcagtcattcagtcatgcaacatacctttcttgatcatctgccaggaccccagcacatttctggaggctgtatttgggggcagattgaagctaggtgcagtatcatctcctctctggtaactcctttccaattgaatctgcagctataactggtattttgtgccacagagaaggaagaaagtatacaggtgggcaagctgggattatgtgtatcaagatggttatagtaatggaggaactatctcttgggatgcattttagcagaaaggaacataaagcattcaaaagagttctattctctagttagtgtcaggactgacttttctttgttctgtggtcaaggaaggccctactgaaaacccaggaatcaaggtgggtgtttgcatgaaggtcccttcagcgtcagcaatgagagcagtaaatcaggcagagctccctgaattaggagtcctcccaggcagtcaggtcaaggtcagatttaatttgggattttgtagtttacaggatgctacccactttcttacacctcacagtaaccatgttccagcagcttattggattggtccaggctgtgcctggtggtgagaacgtcaggttttgtgggcacatggcttcaccaggagaggtctggggtgtctcatgttggtagagaaggagtatgtccgtggactctaacttctctagaggcaatgccaaaggcaaactggatagctgttgctgctgtagttttgtaaatctatgaccctctgttgaggcctctttaactctagcagccttatgcatctttatgattaattcagtaggaccccaccagcagactctccttcttctaagagtgtaaagtcattcatgcaggtttggccttgcttggaggttagggcttggggggacatgagcagggcttgccctcaaattcccagtcatttggctcctcctttctttcacctgttactctttctgctgctttttttttttttttttttttgagacagagtcttgctcttttctcccaggctagagtgcaatggcatggtctcggctcactgcaacctccgccttccaggttcaagcgattctcctgcctcagcctcccgagtagctgggactccaggcgcccaccaccactcccggctaatttttttgtatttttagtagagatggggtttcaccatgttggccaggctggtcttgaactcctgacctcaggtgatccacccgcctcagcctcccaacgtgctgggattataggcatgagccaccgcgcccggcctctttctgctacctttacgttatttacacaagcttggaggcctagaggcaggagctggtatttggatcaatggctgggtaatccagagcagttaaagaaccaagaaattattaatattttgttccaggttatatgtttttatggggtgatggtgaaacaaagaatgaattttgtttcctaaatgtgtgtttcttgcactgatagcaaaattagccactgtttacatttcctgagcactcatcagcctgtggtagagagaactcaaaggtaagtgtggttgcaaggaaagaaaccgggaatccagtggttgccgctagcttcattcaatgtatagatccagattattacatattatctgaattaaacaattttactttagagagatcatgcaggttctgtgtttgaggaaatcttacggttgcttataaaggaaatcattgccccaaaattctggatttcaactaatctgatctgcttaaagcatgacacctgcatacttgctaacttattttttgagaatagagagttagatcaggaataggattcagtccttagaatgcagagcttataattttagaaaggtatgtattttatttaggccaggtatttttactgttaatatatttactgttttatctagaatgttgactctgttatgattgagtcagttgccccttccccacttcctctttcctctgtgtatttattgcacactgactaagtgtctggtgtgacagcaggtgctgcggtcatgagggtgactagttagacatggtttctgccttcatggagcttacagtctggtgggagggatggacaaaggaagcacagaactggacaccatgcattttctcctctgacatcagagccaaactggaagatcctgaaaataattctattgcatgtcccttggagatattaacacattgctcagtgatgttgattgttaaaatatcctcttgtttggaattgttatcacagtggctcctctggcggtagcatgcttataaaagcaaccaggaactgcccatgtgcccagtctaggctcctgactcccacagatgcctctggggctggggcccggctaaatattttccaggagaaaagtcagtcaggagccagcgcctgccatttcccattctttcagagccaaggagctggacgggcatctgacagcctggaagggccctgctccaatctggaactgaggttaacgcttcaggtcagctacttcctaagggaaggaaaaatccctcccagggatttttttactttgagctttctctggtgctgcttgttgctggccttcagattttggccaccactatcttcgggtactattttctctgcctcccttggagaggtgaccttccccttctgtgcagggccctgtctgtcccatgtggtcttccagggctggggtgaggaggaggcggcgagattattgcctgttacacatggacatctagacgggggaagaaacataacagctttatttttaggctttgctaattctcactcttctcctagttcgctgctacctggcaacagcttattgtcatggcaacaccgatgttaatgagtgaaactctcagtgtgtctgctctcctggtgctctgacagacaccgtgtggagctatctttctggccatcagaggctaaacgctaggcttccttcccctctgcaggcctcccaggccccgggccccgtccacagagggaaggcacggaggcagcgttgacaagggatttatggctctgcttacacattcccagcttctcctctcttcacggatgggctgctgctctcgcactgcccctcctcccgcagtccatccgtccacatttttaagcggtagctgtagcccattttctcatgtctagggcacctcaagatttgagccggtttttacagcaccttctctgcagttgatcagcagggctgaatcgcgagtttgggagaggagatttgtggctggaactggcgctcacattggggagggaagacctgcaccttcagctcttaggctgagagtcagtaacaccaccatagcttcttgtcttgcttctctgacatctgtccctcaagggtgcctttgcagcattacaataattgtgaggaagagcaggcagagtctgctccagcctccttgtgcctcagtttgtccatctctaaagcagcgcatatctgaaattggatggtccttaagttggcgctgctgaggaggggttcatgtgaagtgctctgggctcctgctcaccatttctatgatgtgggtaacttgctcgacccctctgtgactccacttctcacttgtaaataaggatagtaatagtacctacctcagagtgtcattgcaggactccaaccagatacatatgtgtccggggcttataataaaatcatggttcaataaatcttagttcttactacgtgtggtcattattcagtcttcacactgatctcgtgaactaggactattattcttgaattacaaagaaggaaactgaagcatggagaggttgagcaactgccaaggtcgctggaagcaacatgaagcctaggcgtgccctgagtcaccacactgcacattgcaaggtgagcctgaaggggatggccctgtatgccctcagtgacttctccctgctccggggaggtgggcccgggaccccaggagtgtgcctgaggaccttgcactccttggataagaggtgtcaccgccagcccccttcctgtcttccctgtaggcccagcactcattcacaggcagacacttctagttagcgcacatggttgatggacatgtgaggttcctttgaccccatcccttctagtctatgcttctgcttctttatctagaaaatgtgcagccatgtctcatccccgccaaaagaggtactcaagaagagagaagaggagtgttcagtgtcttctccccacgtcccctttcccccagcgaggcacaggggctctctctgggtttggactggagcacctcatgggtgtgaagtcgggaggagccggaggcagtgaggacctgcattgcagcgggtgtgtcggagggctcagcaaacgtgtgctgcatgagatggggaaacgaagccatgtttgccggcatatctggggttccctggtcactgagacatcagagacatgtcaatctgagtccctttgcttggatttaatctgctatttgtgggtgttctgttgcattcagtggggcttcagtcttcattttccttgtcctttgcacttcctcatcattccctttctgcgagcttgcccacttgctaggatggatcctggtcagtggatcaggtggtggtgctgagggctctgttaccctgatggcttgccagcttgcagggcccagcatgcctgtgagggcaaaagggttctgagtggggcctgttcctctgggtgggatgcgctctccctcctcctaggcttggttcctctccttcctcggggcctgattcctccagctcatgctctgtctttcctcagagctcctaccacagtccctgtcccccacaccgttaacacttttacatcagcattgcacatggacataaaggggcactgcagccagtcccctgtggaggatcaggatgtcccagcccttcagggacaggctccagggtaggcctggcagagggaaggaccatgttctctcccaaacaggccagtccttggagctgctgccatggcttcagcttccagtaccctgtttggagggctctttgcaaagaggcagaagagccccaaggtgagttgaagggccctggagccccaggcctgcctgcctggggagcagctgatggcgaatctgtgtcctagaacacgccctgctgccaccagtgtgacatcagccgtggttgtgaaatttctgacaaagatgctgggaactcatcctgttctcgaagtcaccatgccgcccatcagttgacatgctctgttgtcaagaacacaagaaccagagagaaagcacactcagcagagatgtgtcctagggtgttagaggaaggaaccccatcacaaaagaaaattagcaaagacagaactgggcaaaaccaccagaggtccctggggcacgccaattaactagctgggagtcttgggcaagagcgaggggaggccagggcttagggatgaaatgtgaggatggggaggggcctcttgagctggctcagtgcctcagtcgggcactggatatggactgggaccacatcttctggcccctcttattgtccctactgccttgaaaggactagattataattacctgaaggactgagtaggcctagaaatacttccctaactgcttactcatatcaacattccttccaagaaagaagcaggcacgcagtccacaattagagataaaaggcttcaactggaggaggtaaggccgtggagcgaatgtttcagttggaatgcaatcagtcaaacaactagggcaattgactggttatcaaaccctcctgggttttgatgggaggaaagaagaggaattactcataaggcagagttttcttaaataaagagaagggccccccagaagaagaggcttcaggacactgattcttactcttgtctgtacagtagaataatctgggcagccttttaaaaatactcaattcctctgcctcaactcagaggagttctgattcagtggccttcatagggctgggacatcagtattttttgaaagcacccccaggtgattctaataggcagccagggttgagaaccactggtttagaggtgtttaaagacagaaggcaaaatgtgtagactccagcacagaatttgctgttttccaggctgagaccaatagaaagcatatcctgattttaattcacagcggcacattctaaaagtatactccaggatttaaaaagtctaggggcttttggaaatatttgtttgcccatgttcatatcaacattatttgtaatggccaaaaagcagatgcaatccaagtattcattcgtggataaatggataaacaggatgtggtatatacatacagtggaatatcattcggccttaaaaaggaaggagatcctgatacatgctacaacatggatgaaccttgagaacattatgctaaataaaataagccagacacaaaaggagaaatatggtatgattccacttatgtgaggtacccagaatagacaaatttatagagacagaagtagaatggtggttgccaggggctggtgcagggggaagtgcggagctgttgtttaatgggttcaggatttcagattttcaggaatagcaaagtgttctggagatggatggaggtgatggttaaacaacaatgtaaatgtttttaatgctactaaattgtacacttaaaaatggttaagattgtaaaatttatgttacatgtatatattttaccacaacctaaaaaattaatttcagattaataagaatcatctattttaatatttgagaaaaacagaaatgtataaaggagaaaatttcaaaattaccacttgatatctagatgtattctttctctgcatgtgcttaatcatgcaaatacatacacacattgaatcttactttctatgatggcttgcagtctgggttttcatttgtacttgatttggtttaatccttatttcttgacagagatggttccatctcaagggtggagtaagtgaggtgacatagtaggtgggcatcctaacatatccgtatattcagctttggaatcagacactactgggttcaaatttgcacctgtcatgttcacgatcggtgtgaccttgggcctcattctgagcctaagtgtccttatttcagacttgtttgggaagttaaagataacttaggtgccaggtccctgctcaggccgtcgggaaatgggagctgtaactgcagagtcaccggagacttccacggacacttttacgtacttgagatagatattcagtctccacttctacccgtctaacttaggagagagcttcggagaagccctgatctgagattcaggaagtcgccagggctgccacatggtgctgtgaccttggcaacaccagattctttctcggtctctgttactacatttacaaagtgaacacattgggttttggggtctctgggctcctcccacgtccctactctagcatcctttgcctctccgtagcctctcactccctgagatgcagggccctcagtggatgtccagtaaatgtttattgacaacgcgtctcctgcaggttaatcatcaacaacatgcaacaatatcccagatatgaccggctccctccaaagagagaaacctgctttatggcaaactcattgacttttcttcaggaagaaaatttctgctggtgcagcaccatattctgcaggagtttggatagggtgtgctggaaagacagggatatttttccctaaaggcagtgcataggggcagaggggcaaaactcccttttttattcctgtagtgcttgtactggggcagaggaagcagatgcattaccaagagcgtggaaagaagtcctacgtccagcctagagctcagcgcatctttcagctgccaaatggaaggtctctctgtggcaatgctggggagggaaattgagttaggatggcttgttccaaataaaatgctatatttaatttcactctgggaaacatttgatgtccgggctactgtaatacgtgaaatagatttaagaagatcctttttttgttagaacaacagaaaatacaaaacagggaggttctcagatcagttgcaggttgcacgtaggggtctgatcatttcagtgtggtttttaagcatctggcagctgctggccaacggttgactagtcagtatctagcagcctgagtgtcactgtatgcgttgaatctgtctcagtagttcagcctctgaaatgcctttcaagttaagccaaggcattcggcacaggaatgggaaactgtcagtttgtaaatctgggatgtgtatttgtgtgcttgacatgtggaagggaagggttgagtatgaaccaatgctgagttagatcaacaaatatgtatctgactatatgatctaaaaatcagccaggtagagttccatctccagaactgctgtcccttttatgatggtcataagcgccatggctgctggacgcttctctccctttgtggagctctgccctggtgcatttctgggctaactggccatgcagggatttggggaaggagctcacagacctactttacttttcacattgttcctatcccttcaggcttctgcctgtttccttcttgactcctgttactttttagtgtgaggtcagaaaaagctcttctcccctcttctgccttcattcatttaccattcagaggacctcactgaagtggagagaccaacagatagggctgccaactcaaccctggaaatgctcttttcttattttacctggccatctagaaaccaagtgttttatttttttgtccatttatttaaaaaaactacagaatgaagtatttttggggactgtgccactctttcgggctgtaagtagaaaagaacaaatatatccttgtccagcttttcctgttagaccctcagaggaagaagctccagcccgtaacctgtgaggctttattccttggtgatgatgtgaattagagagaaaagctaatctttttgaatgactatgaaagtttctctgtggagcatctgaaaccctggaaacacttgctttcacgaacactgagtgcacccttatatgtggaaagaatttcagaggccaggtatcaggagaggccctgggagagtaaggaaatacaagcagccttttggcctgggatctggaggcctggagtctggaggcctggtgacctaggcagtggagggcccaggagggaggctttccttgaagagcactctatgatgttggttcagctctctgacattgaatttgtcatgagaacccaagctgctttccatgatagaaaggatttcctcctcctcagatgctgagggaaatggttctttgcatcctgcatccagaatcagcacaagacggtggaagtggtcagggaccagcatctgggctcccctgttctccaactggcagtgctgtggggtccctgggcaattgtacagaaagcatgtatatagagtcagatagatatgtgctggaatactgacacaattcaaagctccctctgctcaactcctttgagctgagcttaatccatagctctctgaacctcagtttcattatctgtaagagtgggaatgatgatactgcagagttgtgaggcctgtgcatgctaacgcatgtgatacaccagctacagtgctggctccctggtaaggctcaggcatggggaactggtacaagcattacctctgccctcccatgagacagggggtgctgatatttggtgtgaagaggtgctgacactagatgtgaaggggtgctgatactaggtgtgaaggggtgctgatactaggtgtgaaggggtgctgatactaggttgggttctcctagatcagtctgatgtaggagagccatcttcagctggagctttgggatctgtagttactgaccagtcttgactcaccattgtttgtggtgtctcttgtcttttttcacttgtttccggaaggcagctggtggtaagttttacattagttttagcttgagtattatgcttggttagcgcaatactaaaattatttcctttttcctgtgcattcatctattcaacatgtatttatcgaggatgaactatatgcgaggcactttgacaggcactgatgatgctgtgcttggcgctgagcgagagtttacattctctgtgcatatgagggcaagaagagaagagagagaaaatttaagatgtaagcaaataaatgagagagcttcatattatggtaggtgctatgaaaaagaaatcaaagagaaacaagcagagttttgtggtaacatgactgtgggtgggggttactttaagctgttggtcagggaggtcccctctgggacctggaagacaagaaggagctaggcttgcaaagaaagagaggaagagccttccgggggatggcatagcaagtacaaaggcccagaggcaggacaaccttggcatgtgtcagaaacagaagagcaaggctggcacacagtgaatgaccaggcgggtgcaggtgaactggtcaaagggttggcggtgtggggagagggagtgctagatcatgactggtagggagggtgacgtgtcttttttatttttagaataccatcattctgcctgtggattagaaaagggagttgggagggaatgagaaactggttgggaggccagttgggtaggagaatagaggctgggaccaggtgccagcagtggaggtgagatgaatggacagaatttggccagtgggatgaatgcaagtgcctgggaggcagagttgccagggcctgctgggcagttgggcaaggaggcctcaaaggatgccaggcagtttgttcagaataaacatcaacagtgaaagtcttgtcaagagtgttgggaagttggacatttttagatacagctgatggcagtgcagaagttccactcaccttggagggtcatttgacaaaatgttcaaaggcttcaaaatgctcatttcttttggttcagcaagtccataggattttatcctacagaaacagtcagaaatacacaaggattacttacaagtgtgttcattgtagtcttatttgtaatggagctaaacctgggataatttctctcctctattaatcaccagagggctgggtaactaagttaggatgcgtccatatgatggaacaccatgtagccattcaaatgataacctagaaggacagttaatggcacataaagatgttcaactgcactgctaaatgaacaaacatagaaagttatctacaatatgatcccaaattttataagatatataacctctatttacatctcatatgagtgtagacaggatatactataccctggaaggtataataggtatacattagagtgttaatgataagccaattcagggaacaaaattacaaattattttatttcattctctatttatgattcttctaaattttctaacataaacatttgaaataaaaacttaaaaaaagccctgttatttgaaaaaacttgtgatgtcttaccatgtccaagtataaactgaaaagtgaataaatcagtgggctggtggcccttcttaatacactgccatacataggacaaccatttgtattcagaaagtttgtgttgagtaagtcactggatttgagtcagaagacttggagttggagtcccagctcagccattcactggctttgtgatcttgaacacgacgcttaacctctaatgcacagactcttggctgcttcaatttgcagtgggaatgaatggtgataacaagaacaagaataatgctttcacggagttgtgaggattcagtgatagggaattagaaaatattttgtaagaggaaaaccacaatgtaaatattaatatttcagggcccaagtctttgacatggacgtgactatgggcaccaatagatttttggatggatcatttatggtaccctgtcgtgccctttagtacacctttgcctggtgtacatctcatgcaaccaaatggccagctcacgtctgatcccaagccctgaattaagtgagcaatctgaacatgagggacaatgagttgtcctgagtggcaggcggctctcaagtgaggagtgctttctcattcactggaaaactgtaagtgaaatgctgcttcagcagccacacccagagcccctttgatacatggttcagctgttctgttacataaacctattggaaatgaacctgcaaaggagttgagcagagggaggtgcccattggaataaggacaaaggagaaatgcactacctctccatttaaaggagacatttgctttttaatggaccctaaacactgggatctgaaatgtcacaatctttacatactggaatggacacgcacataaatgctgatgaacagctcagcaggcacttaatttttaaatccttgattgttcaaggacagggatatcctacttggctctgcaagactcatagcatactggacaatgttgtctgcatcggaatgtcttactggggagtcacacctccaaaaagaagctgtgtggtgaatgggtccaaacataagggtttgagcccctgttttcagctgggatttttgggtaaagggagatgaagcagccaggtctaaccaactgcagaggtttatttcttggggactcccagctccattgaggtgtagaaaatatagcacataccagttaccaacaaggatacctgttcctggatggaactgcctggttggaaagaatgctggtggtcagtagtgccttctgatcctaagaagaggaccctaacctggccattttgaataagggccccatagctgctgattaagtgtgtcaatagtgggttccttgtgatgtaacattcatcgtccttcctgtggtggatgaccctacagacccacctgctgataagctaagctgcttgcttaaggccataaagctacagaggtattaatctagagtttgaatcggatctctctgactctaagactcctgctctgaagtcctccattatccttcctcttatagagttgttttgccagtgctattggatttgaattcaattgtaccctacgtacattagaatgaaaatgttatacatcgtagaaaatgaataaatcatggttccatccctcaagaaacttatatgtattattatttaagagtttgaagtgcatagcaagagctcaataaataattattgagtaaatgataatacacaaatatattctagtttatttatagatatccataaccccaatcagattatgatgcatctcataaaaggtgcacacacaaaatcccatcggagtttaaagacgggagagaatacctctggagaaatcaggaaaataaaagttggatgtatcatttgagatgggtcttaaagacctgtaaacactctgacaggtagagatggtgaggcttggttcccaccctgaacctcctgcctgctgattggttcctgcagtagaccctaggtgccctggtttgtttctgctttgtaattccacttcttaatgatatcaacaactgggagctgggaaatgaagtttttattctgataaacctgacttgccacaagaggcctacaagagaaagtatgatttctggtctcctctccaccgtctccgatatgcaaacgagtcacacatctgtatcttcattctagagctctcttttgaactgctaatccccctggcggagcctctgatcctggttatccagcattcttctagatttaaggttgaaacatgatttaaggtcatgaatgcatgaccttcccagactcccttgtacatgagctcccacattcccagcccctgttctgctccaccccttgtggtgatagccagggtggtcagctgcattgcatgttagtagtaagggaagaatggggtggtgggtccagagttgtgtgttataagatgactttggaggtcaggctgttgttttggctcactttgggattttggggagtagcttactttgccatcaatttcctgatgaagaaaaggcaacttagcattcttcgtataagtaaacaggtcagtgttggagataattacatcatgaagcaccgtgggtcccagaggtgggaggcctcatgtaagtactactgtgctattgccatcattgtctggaggggatgataatgtcgtatttgcttgcaaaatggttttctgatgttgggttgaaagagacggttatgtaccttagccaactgttagggctgtttttcttctagcacaatttataaagtgatttttgtcacacccaaatttttgcaggaccgcagaactcagacatttaaggttgtggcttttcagaatggatgaataaacgttcgcactctaaacttaagagtgtgaaggcttgtcaaggctccatttctggtttgctttctgatctcatgcaagtcacttcacctctctgctttttgtttttccatctgtgagacattgctcactttgccaggatatcttcaatatgaagaagataatgtgtggaacgctgtcagctgctgcatcattaaaaagcatttattcagcacttatgtagcattgcacaaagagaattataaagactagatccctgccttgtctgctaggttatattctaatatcttcttaaaaaggcagaaactaggcaactaaagagagcaataattcaaatgttatcttttaagctacacaaataacagtagcataaataattaacaagcaccaatacgcaaagaaatcagttatcaagaatacacagaaatagttatcaaaaatacatagataaaattatcagaaatttctcaactttctggagccaagtcatgcaagaacctggttttatgtaaatgaaattgcgatactgccccctggaacctgagcaagaagaagatcctagtgggcggagtggggagggaaagtgttctggagagttttacttgggattctggtatttgggtttctgtcactgtctcttctccctccaaagtcaactaatactcagacattaaggcttaagaccctgttaaggggaaaggtctatgctttagagaggatgctgtagagtggtaggcaaccatcattcctcttgtgaatattgtggtcattgcattatgggccttcattgaattatgaaccatcatgaggatgagatccaaaccaagctggatggaaaccacatggatgaggccccagagagtgaggacgccatacaaatgtaatcactgagctgtctgaatcatcttgagaaaattctacaagtctgtatacatctgacttccccatcagttacacactttgaaaggaaagctctagggagaagagtaccatttgcttccccaatgctaggagaggaaggtgatgagaccgagattactaactaaattatttcctgtgacttcttagaaaagctgaactcccaaggtatgccgcttggatatggggacgcgcacacacacacacacacacacacacacacacacacacacacacacacagttttcttcatacaggggtagtaaaacctgtcaggaaattaattaaattagctattatttgtgtttctcttatagtttacagcatcctttcactgatttgatctcatttgacataaaaagactagctgtcaaggtaggtgagactaagattaatcatccccattgtacataaaaggaaaccaagactcagaggttaaataacttggccaaggtcacacaaccagtgtgaatctggcagagaccagatttagatattcactgtaataccctgactttctctctggaagatggtcagcagtctaaagccaatgtatttaaataccacctatcacaaattttgcatacaaagatttcaagccccatctagatacctagttttcctctccatatctcatgtttttaaattactattttgtgtcaccatagtgcacagcatgcttaagacctggcttgctgctcttaataattacatagtgtcattgtttcctccacggagactcacagtggaagctagcaagccaggaacttgtccttcactgcacttgggtcttaaacagctacaaaatacaccgagtttgactcccatctccctccagttctcgagctctctgcctgttggttttcagcacgagtttcaagtattctttcggcaggagaagggctcttgaaaaatagcccatcacagtgcaaattcttttctaatgaatgcgctgggcaggcaataaatctgaaagggatgcatctgaatcccggtccaggtggaagatgctaaactggcctaaggttttcaaatatgcctgtccttagcccacttgcagatattgctgccgttactgctgatgccatggcctgtgtggggaggcagtcctcaccaagaactccctccacaactgctgggtgatggggggattgctgcatgctttctctgttccctgccctcccctttttagctattcccctcctctctgaaatcatcccctcctgactttagtccaggatctccttccagctcctcgccttcctctaaccaggaccaactttctggaaaaatggttcttgcacttcagtgtcaattttccccaagaacatgagcatttcaagctttgagtgctgattcgggaatttatccagtcacaggagtttcccagacagacacttcattctgttgattcagagtcatagtgactctgtgatcagagggacttgagtttgaatctctataccacctttgactgacttttggcaagttacctaacctttcagagtctgccaaatgaagacaatgctattgtcctgttagaaggattaaatgatatcacataaagtacctggatgtgctcagcctgtggtgaatcattatatgtcagttccgtttttctgtttctctcctgaagaactcacaaagcctctttatctgttcaaggtcattggatgacttgctaagaactaggcagaagccaaaggtcattctcccatcagttatcactcctacttgacaatacaccccaggtgtcaattagtttttggtttgacctactatattttactgattctactgatcctaagacatgttttcccctacattttcatttctctaaaactaaagtgcaatctaaactaataggttacactttagttggcaccattttttctttctcattgatacataaaataatgggcacatcttacaacttacaactttgacttgatggacatatggtaattatttttaaacacctgactttaaattccctgaactcaaatggcaaacaactgccctgacctggtgattcttgatgcagtctcttcccaggtgccttgtgctggagcgtctgcaagatgtccttaggtggtgggctgccatctggataaaggggcagcaggaagaagagtttctgggcttctgggacacatgtgaatagagtgcaaatgacacttagggttgcattcttgtgtcagagttcagttggcttgtgcaaccccgcccctgtgtttggccccgagatgttttcccacaccttacacagggaactccctatcatgtaatattcaaagtgggcttttcaaccaacatttattgagtgcatactgtgtattaggccctgttaagcacttgacacgtgtatactcttttaattaatatgattactccataaagtaggtacttctttatcttacacaaacccaggcttaggaattaacttacttgcccaggtcttaaactcagatctgtctggctccaaatgtcctgatctgaatctctctgtccttctgcttctctccaagcctgagttggcaactctgccttacctagtggcaatgacaaaacagcataggagttaagcctgagttttcgttctcctaagaatctggttgacaaggtatgtgctaaagaggtaggggtagcttatagagtttgtagaaaaggggggatggagaggaggaaaacccagtacagattttgagcctttctgagtgaatattcagctccttttctccaggtacactcattccatcatttcatctctggcactgtgccagcatggttccagggccaggggtgactctggctacctggcatgaacagtgccccacttttcccatctgtgactttttctgtcttctgccttgaatcagatatgccccaggtgccagggaaagaggagtatgtgcttgatggtctgtcaagtcaggtagaaagaaaattaacatctctaacagtgagtgattgagatggagtattttccaggagctagaatattatgtgtgtgtgtgtgcatatctcctggaaaaacagagaggaggagacgctcctgtagcctcaagagagctcagtttggtagtgaagacagcagatgtatgggcccattactattagcggggcaagttcttaggggtgtgagaaccaagagaacggttgattggtggaaagagcacaggatttggagttctgaagagcacgttgagctttgtcttttccttgctggctcacttgggcaagttccttaaactccaagctttagtttcagttttataatgtgggtagtccatttttacctcggcctcattgaaagaattaattagacactcagagtgcaggcttgatacaggcctcttccagggcctgggatgtattaattgctggtgctccctcagtggcagccttgatatgcacacctaggaatatatacatatgcgtttgtatatgtgtgtatgggttttaaaagtccgtccttcattcatcaaatatttatcgtgtatctgttctaggtgtcagggagttagcaataaataaaacaggcctgaatccctgcccacggggagcttacaatctagtagagagacaatgaataaaataagttaaacacactttgttgggtggcagtaggggctgtggagaaaggtaaagcaggggaatggggtgtgagtggaggtttacttttaaataagacgatgagggaaggcctccgcaggggatgcctgagcaccatctatgggaatgagggggtcagcagggtagactgacattcgagaggaacgcattccaggcagagggaattgcagttacagacactgacagacgaacggcctggcaggctcaagggcgagggagcggcatgagcagggtgggcgctggttgcaggtgaggggtcccgaggcgggcggagcagggcgttgcaggccacggtgagcacggcagcttttgcccggaaggaggccagagccattgcagattttgagcgggtgtggcgtggtctgacgcgggctatcccaggtgagcatggctgctgtatgggaggtgacgaggggtctgtcctgtgtgcgcgcccgcctggctccgcagtagctctgagaactgccttaagctccggcagcgattccctcaggttagaggcggaaggggaagaaggggcctggagaggtgtggttctcgtggtggcgcggccctcgctgactgtgctcaggatgtcccctcccggggctgcgacctggagccgcgggcaggcagtgaggggctgctgccgagctccgcagcccggggggcgggcctggcgcgtctagctcgcggtcagaggtcgggaagggcgccatgggtgtacgtggggacggcgccgggctgcggctgagccgccagggcctgctgagggcaagcggggcctctcgccttggtggcgcgcaaggtgccttgtgaggagcaatggcggtcccggaaggggaggcggggccgagcctggaagcacagtcagccctctgccggcgaggaactctcagtgcgacccctcaggaagagactgagaacttaaaagctgagggtagaacctgagtgtccaaaaggctaagaggagaacagaagggaatgctggctgaggttacacagcacccatcgtgaccctcgacggcctcagtagctggccgtccccgccctgctgaccgggctcttcccgcgcctgatcactaacggtgggaggcctgggccttctggagaaaagaggctagaatcttccatcttgggttgtgcgggactttattccactgtcagtcacaaagccataaatacatttctccaagacaagaaaagagtaacagcagctaacccttctccggtgcttattttgcacaaggtcctgttctgagtgcttggtttgtactaactcctttaatcttaaagaatgatctggtgaggtgggtcgtattattatcccgattttgcagaggaggaaaccaaagaaggacttggcccaaagacccttgctaacaggtgttgggacattatccaaacgcatgcttctgactttgtcaatctcttaatttcttatttgccacgcggactattgggagggagtttttggaaataacatatacagatacgcacaaaggtcagaaagggaaaataaaaaccggcttaagcccctttcttcccatatccatgtgagcacctgccaggcagctggtgactggcaattttcacttcttattttatgttataatttattgatgtatatgtcatccctcttcctaaggctggagactcatgaggccagagtccatgtgcaatccatttttatattcaccatagtatctaagccagtgcttttaacataataggtgctcagtaaatactaaatcatttctaacgttaaatggatgcatgtggtaaccagctctcacttaagccattccgttctgaaaacaatgagaatgagaacctttaaatatgtgaatcataacacagttacagctgcataatgtttttatggttttcaaaatgcttccgcacagtttatcttgtttcgtcttcctgctaacccttttgagagtgggaggcacgcattacttaattataagaaaatgagaaaactgaaggcagagacaacaaatgagctatccaagatcacaaatgggttttgtttctgtttctgattttgtttttaaaatcagagcggagatcagaaccatcatctcctggtcttcctattttgcaagcagcgcccggtacacacctgttggatacacagcttgaacacaggacctaattgttcgctaggcatgaacaacagggtgttttgactcctgcaagctgctaacagtcttgcacagtgctagactgtgcactagcactatctagaatgtgatcctttgaccggtaggcaggttatcacttaccagtttttggcaagatcaggagcttgtgacagaatgtaaatcagctgtgtctataaacacactgcttagtttgtctttttatttttttttacattttattttgaaataattttaggcttaaagtagaagaatagtgtagagttcccataaaccctttgggaacttcctctaatgttaatatcttgcatgaccataatatagtgattaaaactgagaaactgacatgggtataatacttttaacaaacttcagacttcattttgatcttacgagtttctccacttcagtcctttttttctggtgcagatccaatccaagatcccacatgacatttagtcatcgtgtctcctttgtctcatccaagtggtggtagttctcagtctttccttgtttttttttttttttttttttttttgtttgtttgtttgtttgtttttaatgactttgacacttttgaagaatccgggtcagttatcatgtagaatgtctcttaatctgggtttgtctgatgtttactcatgattagatggagggtatgcatttgttgcatactaaatgcatacttctgaatatcacagaagtgatgttcccttcacaatgtgtcctatcaaagggtaaaggatgttgatgtctttctactggtgctgttaaccttcatcacttggtgaaggtggtgtcttttgagtttcttcactataaagctgctatttccccacttctaataagtatcctgggggagatattttgagactatgcaaatatcatgctttttgtcaagcttttgcccatagttttagcattccctggtacatcttgtttacaacagttattatgtttggctaattatgatttttctattgtcctttttgcctccatatttattaactagacttctcccattaaggaaaaactgtcccttcttccccagttatttatttatttagtcattaatttataccagtatcatgtttatttattttattctatgagtaataatccactactactgttaatttattttcttgctcaaattgttttagctttggccattgggagcgctttctggttggcttctgtgcctcttgacatacccccaacctttctcaagtgttttcttgctttgggaccacaagatattccaggcacatcttttatttccccctcagccctagaatcaactgttactccaaggagtactgattcgttttattggagagtggtagtatgtgaaaaccaagacctgggcactaggtgtgctcattcctatcagcttgtgtttatatggagactctcctgatgaaggaagtagtgtgttgattcacattttggtgctagcttcctatctcatcatatcaggaccagttcgtgactctcccactttgagtctcagtgatctttaagttctgttgtgtcaccgtgtccatgtgactcatctgggggtaatttcaaattctattgaattaaagttatgaatcagtgttatcctttcactcattcattaagtcaatatgtcttgcatgtacactgtgtgttgggccttgtgataggcactgggtttacattagtgagtaaaattctgcctttaacaagtttatactatagtttctttgatggcgtctaggagacattactccttttcttggttctgtatattatcagaactcatctcagattgttcagcattctaaaatcatgtaagttcagcctagggaattttaaattttgattttagattcagaggttgttggaatatgaagataccattccctgtcccagtagctcctggggccattaaaaacctttgcccatgccttgtttctgatacatagatggttgacttcttcagatgcaaggaggctgaagatatatactttgacttgataagacctctgaagtcttagctgctccctctaaccaatactctctggtcagtgcttccctctcctatggggttggggtataggggaggcatcctcctcttcaaaccactctcagaccccaaaaggatcccttcagcaaagattctcttgcttgactttcctccacctacaagtcaagttggatctgggttcagcttcaagggggtcgaaagtgaggtcagttaaggtcatttggatgggcatgatccttactcccaggtccacccttcccacttgatttaatacaatctggcattattccaacacttctccctttggctgtttattagcatttcctttaactttttgagcataaatggaataagaatcactttcacggcccagaaaggtgtctccagcaaggagtgttctgctggacgatgcagccttttcaaacgagtcagttagctggaagtgtcccgtgtctccttttcttttggaaaagatgggagtgctgaaaactcatgctgaggctggttctctgtttctattggttcctttctggcatgtgttaaattatgtcttttgtgttctgaacaaatatgtgttctcagcatgcaaaatatgcacacaatggctgaccgattgcctgttcttgagaggaagggaacactcaagctgtggtgagttgattgccaggcactctgtggtcaaaaatgtgagggcaccatgggtcacctgcatgtgccttgaaaagtaatgtagggtctaggcacctgagcatctgttcgtcaggtgtgccgaagatactgccagagatgggctcctgtatgcaggctcctcaacagcctggagcgttcgccccagctttgagcctggtgtagggccaggggccagattgtggaaatgagtctttagtgcctccctccatttttatgttggtgtttttcacaaaaattttctgtgtgtgtgtgtgtattttaatatatgaaatccggtttagagaacagcctcgtatgtcccatcctgcttgtaatgcagtgatctgcccttgagaattttaaattagctgacctacatagcttaactatttcaattaaaagtaacaggcagtatagattggcaagaggtggaggagagggaggggaagatccctcccaggagctttggttcagacaaaacaatagaagtgacgagcgattctgggaagaaggcatgactgatagttgtcatggaagctctgacaccctttccatgggtgaggttctcacaaaggtggcttctggatatccgcctgctatgaacacatagcctttgtgggatggtgccaagcaaactctcttcaagggaaggattcaggcagcattattccttgctcttctgcacatccgctcttccatttccagtgtctctatacgtggctctctgagggccagtgttctcccagccccttcggcctgctcccgggggaatacctggagagtaaacactgtctgtggtacaggggggccattcttcctccctttccatttcttctctactgttcagaattctgattccacagaaatgcctaattaactcagttgctctgcaatgacaagctaacatctggagctaccaagtcaggaaagccattcagccggggtccaacacagattttctcccctctgcacccagctcagctgctgggcactgcaccaaccctgatgtggcaggacgaggatgccaagggctggagcaacccaaggctaattttttttcacccagaaaatcatgggttagatatttttaaattgctggcttattttgcagcatttttattatttctggtagatgaggagatcttgccatcactaggggtccatctctcccacatgctgccttgcagtgcttctctacgtagaccatctctgggtgatgccggtttacccagggatgggatggggtgcagtgtattacgcttcaggttgtatttgtggcccccttgggaatcagttgcaaagcagggccgtgtctgatgtgatggccaggacaaaggtctgaatgactaacaaagaagctgtctctggcaggcaggtaggagcagtccggtgcaccagagctgtggaatgactcccaggttccatttttcacttccactttgcatccatcctcccatctgcctgcccactgtgtacagtgcttactacatgccttacctagtctaagtgctttacataaatgaattcatttgacgttcacaggacatcacagataggcattaccattgtccctgttttataaatgagaatactgaatcattgaaaggttaataattttgcttatggacatttgcttctggagctggaccaggcagtttggcttcagagtccacttggctctatcaaagtcttgctatcaattacataagttccattccatctcagcccgaagtgttttcagagccggagacctcacagtgtctctcaggacagtacctttcaggtttgaatgtgcccaagagccatctggggatcctggtaaaatgcacatcctgattcagcaggttcgggttggggcctgagaatctcaggtccagcaagctcccaggtaatgtcagtgtgactgattgctggtccacacattgagcagcagtgctgtagtagactactatcatgcctgtgtactaatttcactgtcagattggagttaactgcatttggatagggagctctttcagcaatagaataataccagtaagaatttttaatgagtgatcaactatagtagcagttagtaatcaattttttgtttaaaaactaagtttcctaggactctaatggaaaatggaaaggttatgtccccctttttcgtatctttgccaagggtctttcctttgttgctgggtttaacttggcacttctaggctactttagtcctaacttttctcagttaccattatatgcagttctcccagccacaccccagcagtgtgcaagggatcagacacaaggttgaatccatcacaaaagcagaatcaccatggcaactgcatcctttgattcttgagtgtgcccagcaacctgagcagaggcgatagttgaagtgaaccaagttctcctgagaaatggaggggagtggtgccgggcccacactaggctgtggtatcttcctccctacagtgaggggcttctgtttactctgaagactccagacactcaaaatctcctcccctccctccagtcctgcagttagcctccaggggtttctggtcctaaacttccaccaccatgagattactacaatgccttgtgatactcttgttcttctggtttgagttttggtagataagcacatctgagtcttgctgtgttaatgtgtctgtattttggtgtatctgcttgcttgtcgtgtggggcatatgccaagtccagtagtggatgggctggggaagaccagaccttatcacatggtgcccttggggggaaatcttaattccaatgtgtgaaaccagtgaaagtatgattttctgggtcaattttaaaaatatacgttcaagcaaaaagcaacctgttatctcttctctttctgcctctgcacacagcagcctccattgcctagggtatgatagtgtgggttcactttgtccatctcatttggatgacatcagcgaagatgcattctgtatctctccactgaggcctgtgacaggacctaatgttttgtggagctgagagaaaataaaccaaaatgacccaatggaatataaatgctgatttctgttcctgttgtttgacagaaaggaagtaatgaactaagatgcagtagcctggccacgtgatgtcttgacaggcagctttcagatttggagatgcttcagagtgttgtattgagtctctgggaagaccctaagcactcaattcctagtggtcaatggttggcctgttttgagacataaccagttggaaggaaggatgggcctttctgctccctatgatgttgccttaaaaagacatttcctgggaagaactgggcagatggtggctttaatctcactagccttgttcttcatttttatatccaagcttcaaaaaaccagcattagccaacagcactgtttttactgctaagcaaaacttcaggaaagagcatccttcgatagaacattaattaacaaatgtgccgtcagtccaaatgaagacctgtgctgctccctctgccctccctagctccacctttatttacgtacccaaaacatttccagtggtatcaaggcgacaatgataggttttagtattgaagacctaacattaataaatgcagttttgattgctgttcctatctgtatgttctttaaggaggtttgtttaaaagccaaacaatcccacgggtggcagagactctttgttctagccttcgtcgtcaaaacagacagaatcaggtttgggagcaaggcttctacacaggagcctggaaaactattatgcagaagaagcattttttgttcccctgagtaaccaatatagttagtaggcatgatatgtgtataaactgggatgtatctcctgtgatggagtgacgaggtaactaggtgactttggcatgaccttcccacggaaataacggtgctggaccatatatagacaaagataagctttcacttaatatagaaagaactgaagtgtggccaaaaactgtctcctcacccttgccttcaatgtgatttctgagctgcagactcggaagtttctcacattccttgagatagtggtgaacagtaaaaggtttgggaattggggaactgctataggaactccaccaaaatcatgttgaatcttacagagaaatgggatgagtctgtcagtctgactttcttgtgaatgagaatggtcaggtagctctgacaggcctcaaagaaataggctttggaactgacctaccaagtgccctctgagaagaggactagccattctctgggagcagagggaacctggatgatgtggttctttgtccaaggagagtgtcctggaaaggtgttccccatctaggtattttctctgagaagcagaggatgagggctgaacttgcaggaagccgagaggaggaagtaaagtcaggagaaaatctgcctggttaaggctgaaatttggggactcatgatccagagaggttctgtaatgcctaaccctggttttggaggccagggattttcattttgactggcttcactccttggcttattaaatgtctttgactgagtggctaaaccaccctaagccttagtttccttacctgtaaagtgggaataacacttgtttcagaaggtggttaagaggattacatgacataacacatatgaaccatttagctagcgtcatgcctgtcacatggtagctcgtgaaattttagcagctatttttactcctagttttactacaataacctgactgggaaagcgtccgtgggcagggcaaaagggaggagccgtgaagataatcaggaggtcagcgttagagtgggtaccaaaacagccagagaactgtttgggagaagttgcctccagagcactccggtttggtcccctccatcagggcccactggtcatcgggtaccgtgtcagtcacctgaatgacggtgagggctgggccaataccagctctcccaggcggtgaggctttccttccacacacacaggcttcatctcgtaaggctcttggtgggagacacagctggggcactgctggaggaagggtcagctgcacagacctcgcggccctctgcccagtccctgacgtcaaaagggccgttcattcccagggctgctctctccacccagctgctgggtctcagctcttttcctgggaagcccggcgcttcccgggtaggagattctatcccgacagtctgttctagctcccttccctgtttgtgactgtccctcttccctcccactcgcctcccacgctgtcccccacccctgcctggtttccaattttagcggtgttaccagggcaggttttcaggaagcctgctccagtggctctctcctgggccatttccacagaggctgtgtgcccggctaccattccctaaggctcagccattgcgcccatctgttccccgggctgcagccagcgagcatctgcggggggcggtgaaggctgaggatgcccagacaaggggcagggagggctggcccacgtgatggccaggggagtgggatgcccaagggaaatgtcataaagggtccactggttgggaaaaaatggaaaatggaaataaggttaaaattgaaatgtttttaaaaagtgatttgtgaagacttaaacaaatttctttcaaactgctttattactcatagaaattgtatcaatcaacagtgatcgctaaattgctggatcagtcagaaaatattgttgctgctgaagaatcaatgctaattggatcattagggcattattacatgaaacacaaatagctcaggatggtcgctctttgcttggcttgatctgtagtcttcagagaagcagagaaacctcgattgtttcctgctcagctgacatgcagtttcccctcccttgctccccttcttgctggagttaaaggtggatgctggttgcagacatttccccctatttagaaaaacaaagacgtaccatggtccttgaaatcagtgatattgaacagtcctaaaaagtagagaggttaaaaagggatttggattgcattttagcaatcttctgttggggtctgtgatgtgtgaagacacatctgcacctttactgaggcaggtagaatccaacaaaagccactgatagggctccaggcatggggcagggcctgcactgagggttatggtgacagcggcctgagccacaagctggctggaaggactcctggaggggtgagacatttcataagatctgggaggccagcgtcagcgttgggcacaccatcccccagagtgcctgatattggtgaccttgctgcatggcggatgctaatgggtattgactgaagggacaaggtgccttctccacccatgcttggtcattagcacatggttaggtgggcacgcgtggcctcctcttccacctctcttttggccattttccttgccctctcccccaccccctgacctctggcagcccagagctcccctcagcagtgctcacccaactccctcagggcctgaatttccagggtgagagtcccctctctacaccgtctcagtgggtgcttctgccagggtgggatctcgccagggattatgcttgcatcttaacaggaatttactggggatggaagtattaacccaaatggagttaccacagaggggatttcacatgtttctcaaataatgccagagtgagccaaggtttacataaccagtacgaggtgaggggggtgggaagagggcaagcatttccttgcgaggctcctggcagctttatttctgacttgcgagtggttcaagaagcctccatcctcccacgcatggagaagaccagcattgactgcagccccgctatgtccccgcgctggcctggctgtgtattgtcacatagatgatgtcatggcagccttagagaaattctctgaggcaaatcatattgtccccatttttaaagatgagaaaccagaagccaaggatcctgtaatttgcccaaggtcacgtgaaagagctggagttcaagtcatcccaattccagatctttttatcatgccatgttttttatgcctccccccttgtcccagagtgtggcaagcagaggagagcacgcgtgtgggatgggatcaattgcaaaacgtgtgcagcctggccaagcaggtgggggagtggcaggaccagctatgtgtattctcatgctcaagttcctctgggtcttccgaagacagatggggcaggtagttccagctgctttgtgccttcaccagctgagcactggcaggtggggcatttttaacctcacgccttgactatcccctctccctgtcacagtcagctctgcctattgtcctccgtggctcagaagcagctatccttaatcattcatgggggaattttgtggaaagatccctcccaatgtggctgcatctgccataaagtggagattttttgttatgtttgatcccctgctgtattcccagagaactcagtgtgcctggcacgcagtgggtccgcagtaaatttttgaatgaatgagttcgcaaggcgtttctcctggttcttgcccatcagaatttccatttctcctgctccctgggctggcactaccatgcatggtgcccttgtccctgccatcgccatcatcattcaagctccctgctccatcttgcagcctcatttcttagctgtaaagtcttcccagtcctccattgtccttgtgccctctgcatagcccctcctcccagtcaggccgcatcctccgacctggcctcccacctccacgctcagttttcccagccatactttgctcttgctacattcctgccaccctatctcctgggagtctctttgtccttcaggtcagacaatgcaaacttaaatcttgctgaaataagcaagaaaggtacacaggtgcaggaggagtcttcactttcccgcagaaacatactcacttccattgctacacagagacagcaatgcaaggataatgaaaactagctactgacacttggcctccgtgctggaggaacaatgggggaccagggtaactgtgatgaactgaaatgacaggtgtttcctaaaggtggcggccacagcagacggtcatcactgaggaagtctgtgcccgctgttatgagctcttctgacttttcaaggcaaaaatttggattttgtatgaaacctactgtttcttaaatgatgactcaaaaaaatttattcttaatcaactatgtcagtggcctgttggcctctacttcagggagtcttcctagattattgaggcccaaccggattctttacttcctacctgctcctagttagtgaagcatcgtcatggagaggacagacctctggccaaagaacctaaagacttgggccctggtcccgggtctgcttccagcctcagtttccttgtttgtaaatgagagcaataatatttggcttgtccaataatctaccatggtacagctgtgtggcttgtagtttcaaagtgctttcatatgcgtgatttcatttgatcctcaaaagaaccctgtgtggttagcaggggcaagtgtggttattcttaatttaagaggaaagaactgagggtctgagaggtgaagtgacttacccacgatcatagggtttataattggtagagctggctgtgtcatttgggtcttttatctgctgtgtggtttggtgttttgtttgaacttttggatagaatgagatctgtctttgtaagctgttaagtgctatgtgggtgcataagaaggagtaaggagcttacttatatgggttattactaataagtgtatgccctccatttcctcatagtgtggcactcatccatacaccatggtaattgagctctgacgatttgatatgtcatgatcttacctctctaaccaggttgtgtgtgagtacctggaagcagggatgaagtctagtgcagagaggcccatagaatcatttggtaagtaattgctgatgaattgaatcataggaaagtggagatgccacctgagagagaaccataacttgaaaccaaagctgggctgtgcctgaggttagtcaggggcctggtggctcatagtcctaaaccctcagctcatggtctgctggtagccactgatcaaacatgcatgatagcacgtgtgactgctgccatcagtgcgatcaccatccaagaagaccacatggggggatgatgagaaggtatgaaatgacatagtggaaatggcattttggagtcagatctgggtttgactaatccctggctgtggggcaacttaactctgttgagccttagtttctttacctatataatgggataatagtagctacctcatgagtctgtccctggaacaggccaggtgctcaagtgcaatgtgtagtccagttataaattgctttgttagagcagtactcacaagggcactgtttatctggttttgccaatgctgggcactgaattcctcgctgcaattgtcagatgaggttcagtcaatacaaatattcctttataacagtactggtaggagccttttaacttgaggttttattaagataataaagacaactggagaatgactaggtgcacataagggaaatggtgctgttttcaattaaacttcaggccaactatgtacaactatggatatagaactgagttatgatgtggaattccagtttctctccactgaggacctgggtgaactgttaccagagagaagcatctctggagagctcccttaagcatcctgcccactctgtggggccatcccctgctgctcttggctcagattcatctatctgtttcagggcctttgccctcctgagtctgtagttagccacttgctccaagagtctttcagctacagccttcattaatttcattgtgaaggggccttcggctcccctagcatgcgttgtgggacgtcagctgcctgctgtgctcattaccactagcccaggaatgcggtgttgactcatggctgcagctccgcttttgaacagaagcactcagggcctgagcctgtatttatcactaggcagggaaggtcctaagggaaggtgccaggtgaacacagacctcatccttccatcattacctatgcaaaacactaaatacagtcatctcctccggaaactgccccccaggtcccagcagtagttcaggattcccctgttaaccatgttgtgcccactacctttcaggctgcacacacttccctctgtgtttagagagaagggaatgcagaagtctgccgtgtagggcatgaggggtgaagccacaggtcagtcctataagcacctcctccttcctagagcagagccatcacctgctttgggctgtgccaaggctcttgttgagcagttcagtgcctcacgtggactccccctgcaagaattcactgaggattattggttaatgctgataaagcacttgggctgtaaatatcaagtttaatgttaataaacagggggattaggttcatttatgtaaaagggaatgcttcacaatggatactgggcaggggaagactttacttttatcaacaaaaaacaaacagagtaaactgtaaacccagacccatcgaagccaaggccttcttgtctgctcaccctgacattcccacagggtttttctctggggctgtaaatgcaattctgctgctgaactgattgcctgaacgtacttgtgtgcttgatgtctttcaaaaagaaagtgtctaggaaagtgcaaaagaggagcaggcaagacagaaacagcatggccatgtggaggggccgcgctgatcgtgagagcaaagggaattgtattattctttgggatttgcatactttaagaaggtggttcaattaatggcattctgttcctcctagttgaagacagcaaaatggaagcataaggatttgctgagtcctccctccaggaagcttcttagctgagccattctcagctccattctccattgagaacccttcagcacatgcatgcttgcttagccacccgggtttaaattttcattgactgaacagtaaaggggagaagcaaacacacatgagatctctgagcagtgtgtttcaggtgctttataataaacctctccttgccgggagagtgtcatcccatttcacagaccaggcaactgaggctcagagcgggtggtctagaatgtgcccatgcttgggctcctttccttgttcctcccaaaggcagcagttatactatttcctttgtgtaaaaatatttatctttatgaccccagaacacctagtacagatccatagccatttctctgtaattctgaaatccccaagtctctgaaaagtgaaagttcatttattatccctttgacagcaaaatctggcctttcctgaattcatctggggcagagttgtcctaaactgacacaagggtagttgcagtcttatttaacctgcttagagtgaatattcatatgatttactgcagaaatacgttggcttctggggcccttcaccctgctgtgctattacatacagtagatatgcaaatgactttacctgacacattctgaattctgaaatgcatttggccccaagggtttccaataagggaccgtggagctctagaaggccctgcacacagtgagcactacctgcatgttgttgcttagttggagtgaaacctcagtaccctaactttgtgcgtggtacacccatggtgggatggacatagaaccaggccccctgttcagagtcaccacaaagcacctgccgttagggtggcaggaggaagggcaagcaaacagagcaagagaagatggtgccggcagcaaacagcacagggcatggcgtggggacagttaaggtgaacagtgcccacagtcagtgctgtggcaggacaactgcagtggggcaggctcggcagagctgggcaggggatgcagatgctggagaccttgctgcccagcagatgagagtggacccaattctgtagatcgggggccgaggctgaattctgagcaggaaagtaatctgctgaataggaggctgtagtaaggccttttagatggtggctcccggagtgaacaggatcctgaatctcaggctttccttatcccactgagccatgcctccctgcctgaaacgtgtttctgagtaatagcagctaacacttacacagtgcttcctgtgtaataggcactcctgtaactgctggacccatgacgactctgtgcaattcataccgttgttgtcccctttgtatagatgagaaaactgaggcacaccgagggtaggtcgtcaggtcccgtgagtcgcgagtgtgggggctgtggtgagaacccagccagcatggtgtgtgtgtgctcttaactgctacgctctgtcctaacctgttcttttataggtcccagcaaggaagcttttctcctggtccacaccgctgcctgggcatggagaaacctgctggcacattggccaaggttgggggtgaggggtgatgtcatgacccatccaagaactgtaatctcctgtcttcaaggaggccagttccctgggctgacgcttcatgcatagcggctgcatccctgtctccccacttctccatccccttccaggccgttcttcccccatgcacacacatgcctacacatgcctgcaataactccccgataggtagaattaaaattttgaaaaacttaagctaagactataaagtaagaaaggctaaatcagcttccttccttcttccctttgactcctgcaaatctgtagcttccttcaattcattctggaatttttttccagttttcaccctgattatcctttattcttgtcttaaaaataggcaggacattttctttgggcagcggggatggcctgttataaccttgctctctctatatggtcacagtgcattgcatggaagttgggagcaccctcgccttttcctgtgaggtcactctttgatttcctgcaccctctctgccctgtcaatgccgcagggtctgtttttcctataagtctgatgctctcttgtccttgaactccttttccgggtgggttttaattagctaaatttgcatgtgacaaaatgagatataaccttcgtggggaaattcctcacagctttctaggctgggagaaatcgaccatgccattttgtgatggagtgtcccagtttaacacggcaatgtgactgcagacttcatccgcctggtgggcactttgtccccatggctgagtttcaggcttcctgaccttcctggtgggcagccacggcgaaatctagacttcctggtccctcctcagttccctatggacgatggcaagattttgcaaagggacaaaaggaaacttttgctgaaaccttctaggtctttaatcacttgttctttttccttctaaaattctggattcttgccgagcctctttgtgcttcctcttttcattctctgtcacctccacttagtctcgttctcacctgctcctttctctttattctccaagggaggggaagacaacttgaattttaggaacaaagcaagaaacagtacatggaaaggagaaaaggtgctgtggccactgcagaggggggacaggtggctgagaacctttgtaagccagaaagaactcttctctcccattctcaaatataattagttatttctaaaattgagctgaatcgtgggcatctttttccactcaaactttttttaacttaaaattaagttctatgtatatatgtgtgtgtgtgttcattggagaaacagtaacaccacacacaacttagctaacctaggaaggtttggctcaaatgtccattgcaaagtaattaagaatctcctctcctatgctgtgtttacactgtacattcccataatgtccacttcctggctgctggactctgctctataaatataaccagtgagcagtgtctctttcatgctcagctcctgaccagttaaggggaggaggagatgagtccaggaaccagagttggatgctgggaatctccgtgctgtccttccagggaacatttctctgcaccgggccaaggacccacgggatcatccctttccattgtgaaggaaccgaggccgcctcactgggctccattttccagtatttttagttagcagcctgcaagtgagtgttctgcctgcagtgctgtagaaactggcagatgctctgtgttgagtggtgtgcaggacagacaggagtcggtgctggagaggcgatggctgcaactggggcagagaagtgagccttcctgtcttcctgggggtgatcatccccaaggcagtgcatcacgctcccgtgttcaaagccgcagtggtataaactctcgaagagaacagtgtctacctttactctggaaagaagtaaccgaaagacaggagcggatgttgcctcctggcaagagggcctcacggtgtggaggggcaatgccaaccttggcggtgacggacttaggttctattatggctctaatacttgctgactctgggaccttgagcaagttatggtaaccctcagcctctgtttctccctctgtacaatgagcatcacgatagtcctgttctcacagagctgctatgaaggttgcatctgggaagcacctggcaccgtgcctggcgtaaaataggccctcaggaaatgttggctattattatggccatgcttgactggcacctcagtttgatgtagtggttgtcacgtttcatttctagcgttctgaataggctgtcagtagagaggtaaggaggtaaggactctggggccagactgcctttcttcaaatcccaagcctgccacttaacagctctctgacattgagcaagttaattcatgtgactgggcctcacttttctcatctgtaaagtgagtatgaagtgacgtatacttcactgggtcatggtgaggggaagtatgcaaagcaggagttggtgaactggcgaacaggccacatccggcctgccatctgcttttgtaaataaaatggtatcagaacatagccacacgtatccatttatgtcttgtctgtgactgtttctctgcagcagcagcagagatgagtaattgtgacagagactgtctgtcctacaaatcctaaaataaaatcctaaaatatttactacctgaccctttacagaaaaagtttgttgccctctgattgtaaaaggtttaaacagtgtgtggcacagagcagatgccaggtaaatgtttgctgttattcctgctggtactcctctgcagttcgtcacccccaaccctcacattagctctgtgaagtgggcacacagaggtgatgattgttccctgtttattgcacctgggattcaggggactcacgtgacctgtccaaggtgaggccaggcctaaaatctagtctagggctcactcggccggtggctccgaatcagtgacatctgccttgccttctctcttttttttttttttttgagatggagtctcactctgttgcccaggctggagtgcagtggcgcgatcctggctcattgcaagcgccgcctcccaggttcacgcgattctcctgcctcaagctccgcctcccgggttcacaccattctcctgcctcagtctctcgagtagctgagactacaggcgcccgccaccacgcctggctaattttttgtattttcagtggagacggggtttcaccgtgttagccaggatggtctcgatctcctgacctcgtgatccacctgcctcggcctcccagagtgctgggattacaggcgtgagccactgcacccggcctgccttgccttctctttagattcctcaaggacaaggatgcatcagtccatctccctgaggcatggacagtgcctcacagagcccacccagtcagtatctgcggagttcatttgtcttctgtgctccacctggccagcatcagcactgagcactccaggaagagacatttccaaccctgggccgttcacctcccagcacctggagttgggagcactcagcttattaacagggcagaaactcccaggttgcacgcacagcaccgaatcctgaagggcacaggccaagaccctctctccatcccgagacctttagtcaggattgtgggtgtggttgatgacagctgatatctgggtagcaatttatggttcactgaacacttttacatccatgatctcatttgatcttcatagcaactactcagggggacaaactgggtgatggcctacgctgtagctgaagtggagagagactggcacctcctccaaggccatgcgttaaatacccactgagccaatggagccctggtcatccatctctaatccagtgacctcccaaccccagccggccctcctgacttgatcattgtggtgatgccagtgctgtagccttgggcactcattccattgtctaatgaccctcactgtccaataattcttttttgtctgtaatggaaattccacatgctttaggggtttgttctgctctcagtggagatgacgacaagccacccagaataatagctctactttttagtcttcagccttgaagctgtcctctccctaaccagcccaggctggctcttctgtccttgtgggtttgctggaacacagaccatcccatccaccctggtgacttctaccacatcctgcacttagagcaacttccagcatgacgcagaaggagggacagtgtgttctgcgttggctcagcccgtctgcagaacagtcatgtcactttggaagagcctgagtttgagagggatgtgtgtctgctcatatgaatacttcttgatcatttagtttctgtcatcagtatctggggagtggagaatcgttgctgagggcttctgaagagcaggggagaaaatagatcacgttgacagtcagcataaggtcatgggggtgaagggcaaagggaagctgagttgctgctggacagtgtggtctactgacatgtctcctgggatcgtgaccatcatgagggcaggcggtcaatggctggtcagagctatacccagctttctagtacagtgatcctaaaggacatggctgaagcgtgttgaaatcctcctttgtaatgaaaattctcccctgcaaggggagaagtagcttctatgaaatttccagcagaggtttccaagccagggaggttgaggtaggtcagggaggccgcaggtgcttatctaagtggcactgccacagtctttgagtttccattactggcctcctggattcagtggagtcctgctagacgttgtcattgcagggcaaccaaacccagccccgggcccatgggaatgaacatacatatcttctaatggttagagaaataaattgctttataaccaaaatacccttttggttatgtgtctctcttggaaaaataatcagaaacagctgccctgcagttctccagagaatggagtcttcctagtttccatgaagcgaaaatgtttcggaaatcagaactgaatgaggctggggcgagaggtggggctgaggatggactcctggcacctcctctgattgatcctaaatcactttctcactctggccttcggtttctgcatctgttaagagggctaatgaaacctgtttcttactgcaacttgacaccatgaaaatttagtctctcatctgcagcaggcttaggcaaagtggctggccacataaaacagcttgaatccttgagcatggtggatggagtttgtttaatgagtgaagctgtgtagcccactccatgtctgtcctaccattaaaatttttattgttatttgtgaagtatccactggagttcagaaaaagactgcacaccactaaatcaagttggctcagctcctgctgcggttaaaatgagtgctgtaaccccaattaataacgatttttttccaccagagatggctgcttggatgaatgtattatttgctgggggctcttgtggggcttgcttgaagtgtgtaaatagtccgcctgaaaaagaaagtccaaaaaagggctggtttagacagagtggcctctgcaatctggccacagtcaaaggcttcttcacatcagcagctctgatacgatacacaaacgtttgggttgtaggacagtgtagaaagaggaccctctgggaggccaacgtgctgagtggaaggtggaaggacatggaaagcagcaaccgtgcagctgaggctaagaagccccggagcaggcttgggggcttcttgtgtgagtcatcatttgtcctccactgtctatcaagaagcagggacaagagttatgcactttaaatgtcaaggttgcctttgtaggtggtagaggcctggtgggttccaggagattattcaggttctatgtagagcaaattccagatcagatgaaggtgtttgtgcggggacagctgtatgttttctgttacagacctgttaggtcaaaccccttctttcttttttctaagctcttactcttccccagtttttacttcccaagactttcttgggtccttccaagtcctccttagaggatggcactttgctgggtccatgggtttaactttttttttttttttcagtctttcccatacattcgagttagcttgaaagtgttgatggccctctcccgcaaaaggaatatcatttactccctaccccttgtgttacatgggcaggggaaggagggagtttctagctcatgttcccggaagggaaggtatggcaggaacacatcccacttttccctgtctctttatgcccttgtccccaggggagaagtgacctatctgactggtgagtttggtgtagccccttctgggactctcttttgaatccacttatccccaaagaagggttcaccaagttattgggactgatctggccctgtggggaaaacctgtgatggtctcaccttctggcagggtaagtacatttaatagtggttgaaatattaggaagtccttcgaagcccgtctaagccacttcctccattttataatttgtttctaatcaagcttttggtttgatttaatctgtgtgtcctatatcttacttcttaattggttctgagtttataaggggcagaaaggatgattatttattggctgccacccaaaggcttagaactcctccttggtcattgactgatccatgtggaaggctctccaagcagctctgggtacagtggaggccaaacatatgtgcatacttttccccaccagggtactatttgcaagtcattggaacctaagtccgtggcttctgttttctaagaacatctgctgtggaaatgctattcttttcctctttcttcatccctgaaataatgataccttcctcgcaggagggtgttgaggattaaataaaatcaagcacattcacacacgtaggtagtcagtaaatgtcagtttctgcctctccgtccatccactggtaacctacattgtttaagtagcgcttaccactattcattctgatgtccaaagtatgcctctcatgttgcaatggaagatttcttctatctcattgggagcacttaataacctttaatacatgatgtgaaaaccttctgtctcacatgcctgatttatgggatcactggagagagaaaactttgaaaccaacagggaagtaagggatgcgtactgagtgggagaagcaacagtactgggatccaggggagggctggatgggaagggctcagtcatggataggactgagggtgtgctggtgagcctggaagccatcactgggtgaccaacctcacctgggcacttcttagtttggatgtgccttatttaaagtaaaacttgacacagtccagaaaaactcgcaatgcaaaaacaactcacttttctggagctttactgtgtgtgcccagcactgtgctcaccactcgagagcccctaggcaggcaccctccctccagttgttctcagggagtggggtggagagtatcagtacagaggagagcctcaaacgaccccagactctgtctgtcagtatgcttctggaggatgtaggctgagtcttatcttctcaaccgccagttgtctgtagtggcccttccatttcatgtcttccttagacacatactccagtctgttgttttgagtgttggctgtgaactctgtaaccctgtattttctgttttcctcttagtatgagaacgaaggtgtgggcccggattgccccattactcttgtgtcctgtgcaccttttgtatcgtgctgcggcaaactggcacaggggatgtcagctccgcaccctctgctgtggattgtccagggtccaggcttccccttcctactgctcacccctgtcccctttgctgttaacacctgcccgtgggataagggaaaagaaaaaagccactcaaactactccattgtgagatttgctatggagtcagggctgaagtggggttggttgacttgcagaatctgtgaatgggggacgatatatgttgagaaagtgcctgggtgattctgatacgtcccatctacactttgagaactacaggttcattaccactgccaagaaaaagatcttttcatatccccccgtcctctcttcacttggatggcagttgagtctctgaaagagattcatcccgaaggtcttttaagtgaagagaggcaaagcttagcttagtatttcctttctgaagagcacatacccctgtgtaaaattgaggagcaacagccttaaatggaagcagctgtgattccccgcccctgtgaaggggctgtggccctgcagatgccacggctgtggatgcgtagagcttgggtaccctccctggcttcatggctgacctgctgtgtgaccttgggcaagtcagatttcctctctgtttgccatctgcaaaatatggatacagacccgtgctccctcctggttttactgaggtactgtgagagccagtgaaatcacggttatgggatgctcagcattctgctgcagaaaaaaaaaaaaaaaaaacctagttactaggaaagcaccattccccaggtgtgggagttctcagtacctgtgtggagtttgctaacagacctggggtcattcggggtgtgacaggcaggccctctctcctagatccaggtccatttactaatgtccttgcccatccatgcctgcaagaaggaagagatgtctgaactgccaggaggtggtggctacagatggtccctggcacagcaagaaggcagtgccaatcaaaggaggtcggcctcttcaattagaactctgagcagatggggctgaggcagccagaaggggcacttcccagtttactaagtgtgtgacagtaagctggtggccttcagaagaccaggagggtcacctggttcatttcctttctggaaggaagggcagtgtttaggataagtcagatgagattcctcctcattggacagataataagctttattgtgagttaagcaatatgcttggccctacggatatcacattaaacaaaatagacctgaccctgaccttactagtttacaatcacacgatcctgaccttactagtttacaatcacaggatcctgacctgactagtttacaatcacacgaccctgacctgactagtttacaatcacacgaccctgaccttactagtttacaatcacacgaccctgacctgactagtttacaatcacacgaccctgacctgactagtttacaaccacacgaccctgacctgactagtttacaatcacacgaccctgacctgactagtttacaatcacacgaccctgacctgactagtttacaatcacacgatcctgacctgactagtttacaatcacacgatcctgaccttactagtttacaatcacacgatcctgaccttactagtttacaatcacaggatcctgacctgactagtttacaatcacacgaccctgacctgactagtttacaatcacacgatcctgacctgactagtttacaatcacacgatcctgaccttgctagtttacaatcacacgatcctgaccttactagtttacaatcacacgatcctgacctgactagtttacaatcacacgaccctgacctgactagtttacaatcacacgaccctgacctgactagtttacaaccacacgaccctgacctgactagtttacaaccacacgaccctgacctgactagtttacaaccacacgaccctgacctgactagtttacaaccacacgatcctgacctgactagtttacaatcacacgaccctgacctgactagtttacaatcacacgaccctgacctgactagtttacaatcacacgaccctgacctgactagtttacaatcacacgatcctgacctgactagtttacaatcacacgaccctgacctgactagtttacagtcacacgatcctgacctgactagtttacaatcacacgaccctgacctgactagtttacaatcacacgaccctgacctgactagtttacagtcacacgatcctgacctgactagtttacaaccacacgaccctgacctgactagtttacaatcacacgaccctgacctgactagtttacaatcacactatcctgacctgactagtttacaatcacacgaccctgacctgactagtttacaatcacacgaccctgacctgactagtttacaatcacacgaccctgacctgactagtttacaatcacacgaccctgacctgactagtttacaatcacacgaccctgacctgactagtttacaatcacacgaccctgacctgactagtttacaatcacacgaccctgacctgactagtttacaatcacacgaccctgacctgactagtttacaaccacacgaccctgacctgactagtttacaatcacacgaccctgacctgactagtttacaatcacacgaccctgacctgactagtttacaatcacacgatcctgacctgactactttacaatcacacgatcctgaccttgctagtttacaatcacacgatcctgaccttactagtttacaatcacaggatcctgacctgactagtttacaatcacacgaccctgacctgactagtttacaatcacacgatcctgacctgactagtttacaatcacacgatcctgaccttgctagtttacaatcacacgatcctgaccttactagtttacaatcacacgatcctgaccttgctagtttacaatcacacgaccctgacctgactagtttacaatcacacgaccctgacctgactagtttacaaccacacgaccctgacctgactagtttacaaccacacgaccctgacctgactagtttacaaccacacgaccctgacctgactagtttacaatcacacgatcctgacctgactagtttacaatcacacgaccctgacctgactagtttacaatcacacgaccctgacctgactagtttacaatcacacgaccctgacctgactagtttacaatcacacgatcctgacctgactagtttacaatcacacgaccctgacctgactagtttacaatcacacgatcctgacctgactagtttacaatcacacgaccctgacctgactagtttacaatcacacgaccctgacctgactagtttacaatcacacgatcctgacctgactagtttacaaccacacgaccctgacctgactagtttacaatcacacgaccctgacctgactagtttacaatcacactatcctgacctgactagtttacaatcacacgaccctgacctgactagtttacaatcacacgaccctgacctgactagtttacaatcacacgaccctgacctgactagtttacaatcacacgaccctgacctgactagtttacaatcacacgaccctgacctgactagtttacagtcacacgatcctgacctgactagtttacaatcacacgaccctgacctgactagtttacaatcacacgaccctgacctgactagtttacaatcacacgaccctgacctgactagtttacaatcacacgaccctgacctgactagtttacaatcacacgaccctgacctgactagtttacaatcacacgatcctgacctgactagtttacaatcacacgaccctgacctgactagtttacaatcacacgaccctgacctgactagtttacaatcacacgaccctgacctgactagtttacaatcacacgaccctgacctgactagtttacaatcacacgaccctgacctgactagtttacaatcacacgatcctgacctgactagtttacaatcacacgaccctgacctgactagtttacaatcacacgaccctgacctgactagtttacagtcacatgatcctgacctgactagtttacaatcacacgatcctgaccttgctagtttacaatcacactatcctgaccttactagtttacaatcacaagaccctgacctgactagtttacaatcacacgaccctgacctgactagtttacaatcacacgaccctgaccttactagtttacaatcacacgatcctgacctgactagtttacaatcacacgatcctgacctgactagtttacaatcacacgaccctgacctgactagtttacaaccacacgaccctgacctgactagtttacaaccacacgaccctgacctgactagtttacaatcacacgatcctgacctgactagtttacaatcacacgaccctgacctgactagtttacaaccacacgaccctgacctgactagtttacaatcacacgatcctgacctgactagtttacaatcacacgatcctgaccttgctagtttacaatcacacgatcctgaccttactagtttacaatcacaggatcctgacctgactagtttacaatcacacgaccctgacctgactagtttacaaccacacgaccctgacctgactagtttacaaccacacgaccctgacctgactagtttacaatcacacgaccctgacctgactagtttacaatcacacgaccctgacctgactagtttacaatcacatgatcctgaccttgctagtttacaatcacacgatcctgacctgactagtttacaatcacacgaccctgacctgactagtttacaatcacactatcctgacctgactagtttacaatcacactatcctgacctgactagtttacaatcacactatcctgacctgactagtttacaatcacactatcctgacctgactagtttacaatcacacgatcctgacctgactagtttacaatcacactatcctgacctgactagtttacaatcacactatcctgacctgactagtttacaaccacacgaccctgacctgactagtttacaatcacacgaccctgacctgactagtttacaatcacacgatcctgaccttgctagtttacaatcacacgatcctgaccttgctagtttacaatcacacgaccctgacctgactagtttacaaccacacgaccctgacctgactagtttacaatcacacgatcctgaccttgctagtttacaatcacaggatcctgacctgactagtttacaatcacacgaccctgacctgactagtttacaaccacacgaccctgacctgactagtttacaatcacacgacctgacctgactagtttacaatcacacgatcctgaccttgctagtttacaatcacacgaccctgacctgactagtttacaatcacacgaccctgacctgactagtttacaatcacacgaccctgaccttactagtttacaatcacacgatcctgacctgactagtttacaatcacacgatcctgaccttgctagtttacaatcacacgatcctgacctgactagtttacaatcacacgatcctgaccttgctagtttacaatcacacgaccctgacctgactagtttacaatcacactatcctgacctgactagtttacaatcacacgaccctgacctgactagtttacaatcacacgaccctgacctgactagtttacaatcacacgatcctgacctgactagtttacaatcacacgaccctgacctgactagtttacaaccacacgaccctgacctgactagtttacaatcacacgatcctgacctgactagtttacaatcacacgaccctgacctgactagtttacaatcacacgaccctgacctgactactagtttacaaccacacgatcctgacctgactagtttacaatcacacgaccctgacctgactagtttacaatcacacgaccctgacctgactagtttacaatcacacgaccctgacctgactagtttacaatcacacgaccctgacctgactagtttacaatcacacgatcctgacctgactagtttacaatcacactatcctgacctgactagtttacaaccacacgaccctgacctgactagtttacaaccacacgaccctgaccttactagtttacaatcacacgaccctgaccttactagtttacaatcacacgaccctgacctgactagtttacgatcacatgaccctgacctgactagtttacgatcacacgatcctgacctgactagtttacgatcacacgatcctgacctgactagtttacaatcacacgatcctgacctgactagtttacaatcacacgatcctgaccttactagtttacaatcacaggatcctgacctgactagtttacaatcacacgaccctgacctgactagtttacaaccacacgaccctgacctgactagtttacaaccacacgaccctgacctgactagtttacaatcacacgaccctgacctgactagtttacgaccacacgaccctgacctgactagtttacgaccacacgaccctgacctgactagtttacaatcacacgaccctgacctgactagtttacaatcacacgatcctgacctgactagtttacaatcacacgatcctgacctgactagtttacaatcacacgatcctgacctgactagtttacaatcacacgatcctgacctgactagtttacaatcacacgatcctgaccttgctagtttacaatcacacgatcctgaccttgctagtttacaaccacacgatcctgacctgactagtttacaatcacacgatcctgacctgactagtttacagtcacatgatcctgacctgactagtttacaatcacacgatcctgaccttgctagtttacaatcacactatcctgaccttactagtttacaatcacaagaccctgacctgactagtttacaatcacacgatcctgacctgactagtttacaatcacacgaccctgacctgactagtttacaatcacacgatcctgaccttactagtttacaatcacacgatcctgaccttactagtttacaatcacacgaccctgacctgactagtttacaatcacacgatcctgacctgactagtttacaatcacacgatcctgacctgactagtttacaatcacacgatcctgacctgactagtttacaatcacacgatcctgacctgactagtttacaatcacacgatcctgaccttactagtttacaatcacacgaccctgacctgactagtttacaatcacacgatcctgacctgactagtttacaatcacacgatcctgaccttgctagtttacaatcacacgaccctgacctgactagtttacaatcacacgatcctgacctgactagtttacaatcacacgatcctgaccttactagtttacaatcacacctcctgtttcttgccacttgcacacaactcagggatggggtaggaggaggaatatcataaatgcaaattcctgtgccttacactggagctactagatcagactacctggaggctaagcccaggaatctacatttttaacaagcttcatagttcagccttgcacatattaaattttgagaactggttacttctccatcaatgcatggggtaatcagtcaccttgggcacattggtgtcttaaaaatgacttaaacacataattggaactgttttgctaagtctagcctgtgtctacgttgctagaaaagccctttttccccttattctgatggtatagaagaaaacaactgcttaaatcaaatgaattaatgtgttgattgagctttcattacctgtctagcttcatgctgtttggaaaataaatataaaagctataatcctggcccctgatgagcgtacagggttcttgagttgataaaacacaccagttaaccagttagagatgacgagaagatggtgcaagattaagagccaggacgtaaagcagatggcgcgtttccaggggtagagaaatgaggacatcggcaggtcagcattgcagccacatcctttctagccatcctcagattccagcctaatgatcagtcgtaaactcctaaagaacttaaaaaaaatcctggaaaaattcaggagattcagggtgtagtataggaatctgtttgattaaaacactccacaggtgattctgatgggtgtttccaggtttggaaaccagcatgctaccttttaaaatagtaaatggattagttatctcttttttagagggggcatgagaacaacagttcctttatccattcttctattacaccagatatgttacagttgcactcaaaaatcgtggtgactcaacacaacagaatgtaaacccaatcaggacgggggtggctctgctccatattgtaggggaccagggctttgctgtcttcgttggtggctttccaggcctccctgggtgttaacatccagcactcagacagtcacagaggaatgaacacagttgtttgtaatggcggccaagatcgtccaggcccggaagttgtgactatcactttcactgacatttcactggccagaagtcagccatgggccacacctgtctccaaaggaggttgagaaatgtagtccagctgagtaccctggaggacgggaccaggctgtggtgggacagttcagtcttctctagcacagcggtctccaacctttttggcaccaggaatcagtttcgtggaagacaatttttccatggaggaccgagaggggatggttttgggatgaaattgttccacttcagatcatcaggcattagattctcatcaggagcatgcaacctagatccccagcatgcacagttcacaatagggtttgctcccatgagaatctaatgctgctgctgatctgacaggagctggagctcaggctgtaatgctggcttgcccaccgctcatctcctgctgtgcagcctggttcctaacaggccatggaccggtacctgggggctggggacccccgctctagcgtgttcccttcctctccaagtctttaagcattttcattgatctcttctcctccagattctcccaggttctcaagcagtgaggttccaaactaaggtttaactctctagtcttcagaatgttcttttctaactgttagaactgcaaagacagccttgaaatggtatattctttatacctgttgcctccacttcacttggtcttactgttaggtttaaccttaggaaatcactgatattttttgacctacagaagcggcattttcatacaagtgaatgctacactctcaacttgattgaagagcaccctcaatctgccttcagcacgtgcactcccactctgcagtaggcagaggtttgagaaccaagccaaaggaaagagaagagggaggcagagtttctttgtactacatctcatcacctgctgtgtttggggtctgccctgtcccaccatagtaaagctcatatcccacctcttcctgaaaccttaataatgacatcttatttctggttatttgccagaagctttcacacacatgatctcattcattgctttgaggaattcgcttgtttccgcctctcaatttatgagataatgagagttatgtaataattcccttcttcagtttaactgccaggaaacttaggccagcatttgtgattagtcagaataattttactgtgtgtttttggttggtatatattgttttaaaatatgtattttactcattaatttttgaaaactcattttttcctcaagttttttttttaaatgtgaaattttaaaaatctcaagttcttaaaaaatgatgtgggataaaacaactaaatttaattatatcatcgtctttggaggacggtgttatcttcatcttgcatatgtagaacctgaggtccataaaaaccaattttccgagcccataaggctcctcagtggggtaactgggactgggtttcccaaccagatttaatccagggccccttctgctgtatcaatgctgcccttccagactgtccctttcatcatcactttaatctcttccctctcgatttcagataactcgtattttaagacgcctgaatattttctatcttattattgtagatatgtgagcatcagctccttaaagttaccgaatatttctgatcaaattctggttatttttgtctcattaaaatgaatatttaagttttcaggagagaagaaggcacaaatctcccttaaaaagtaatccatttgagagatggattaataaagtaatattatgaattcaatataaattaacatatgtgttttcaaattccaaaaatagatgagggagatggaattacactagtgagttcagcatgattcctaaccaaggccttttcataagtggaagtctttcacctggccctggggaaatcacggaactcaatatttccttcacttaattgtttttcttttccatttaaggaaaggtagcttaaagcagtggttctcagaatatggccctgaaccagctgcatcaaaatcacctgggaacctactagaagtgccgattctacaaaaaggaagctccccacaccccgccctgccccacacgggacccagcagtttgtgttctaacaagcccaccaggtttttgtgatgtatgctgaagtttgagactggttagcttaaaacagcctctgagaggggctgcaagccactctttatttggatcataactaagtagttaaaacatccctgagtgaattcaaaatgctaatgaggaaaattaatgtctttatcaaaaaaagaaaaaaagaacaaaacaaacctcaggagaccagaagtaagttgcctctttaagaagcagagccgctttgagatgttgcaagggggagctaagagcagggcagaattttccagtgtcttttgacaggaggaagtggttggggacgacttatttttttggcccggagacagcctgtcattattagactaagcattgtatcagatctaagtgtgtagctttcttaatgtaatgcagagcaggagctatacgttttgttttgtttttcattttatcagtaagaatgagtgcattacagcctgggcaatgtagcaagacctggtctctactaaaaaagtaaaataattagccaggcatggtggcacgtgcctttggtcctagctacttgggaggctgaggtgggagaattgcttgagcccaggaggtggaggctgcagtgagctagaactgtacttctgcactccagcctgggtgacagaaagcactagtaatagctttgtgagctaagtcccgctttcttgggtgttctcatggtcatgctcagagaatccccctctccccaccagcatccaccagactgcacactggtgtgcaggagaaaccagcttgcctggcagcctgggtccagcagtcccaaaccatcagaaggaagaccgacatcctgcacctccacatggtcactaattccctgctgtggggggcacattttggcctgacttggctgacacaatctggggaaaaaagagaagtatgggctgagtactgtggctctcactggttaatcccagcactttaggaggcagcagcaggaagattgcttgagcctaggaattagatcagcctgggcaagatggtgggaccttgtctctacaaaaataaaaataattagctggccataatgccacgtgcctgtagtcccagctacctgggaggttgaggtgggaggattgcttgagcccaggagtttgaggttgtagtgagccatgatcatatcactgtgctacagccttggtgacagagaccctgtctctattaaaaaaaaaaaaaaaaaaaagaacaagaagaagaaagagacagaaagaaaagaaagaagagagaaaaggagaggagcacagattgctcaaccccatggaggcaaggctctcacttctgctggtggggccctcggcccgtcctggagtcggggtagcatcatggttgagatcacatggactccttggctaaagtcctgttttgaacacttgttggctgtgtgatcttagattaggcactgtttctctctgcctcaacattcttgctcctaaagtggggttaattatatataccttgcagggctattctgagaattaaatgagttaatgcagaagttctgagcctttttggtctcaggactcctttatattctcaataactactgagaatcccagagagtttttatttgtgtaaattatagctactcatgtttattgtattagaaatcaacttaattcattaaaaaaccgattgtggccaggtggtgtggctcacacctgtaatcccagcactttgagaggccgaggctggcagatcacaaggtcaggagatcgagaccatcctggctaacatggtaaaaccctgtctctactaaaaatacaaaaaaatttagccaggtgtggtggcaagcacctgtagtcccagctactcggaaggctgaggcaggagaatggcgtgaacctgggaggtggagcttgcagtgagccgagatagtgccactgcactccagcctgggtgacagagcgagactccgtctcaaaaaaaaaaacaaaaacaaaaacaaaaaaaactgattgcatgttaacataagcaatattgtttctgaaaaataatttttttgtaaaacaaaaaaacagaagagtgacattgctttacatttgtatagattagtgtctgacttactagaaaacagctgggttctcatatctgctctgtcattcagtgtgttatggtatcacatcatgtaggctctgggaaactctgctgtgtatttgtgagagcattacagtgaaaatgttagagttgttataaaaatagttctctcctcacagatacacgaaaaaggtctcagagatcctgctggggttccttgggacacactttgagaaacactggattaataagtcatgacaagtgtttagtataacaccttgcatatggtaatcactgagtaaaacattattacaaacagcactatttactaggagatatagcatcagaggtggttttctatacatatatgggccaagctctagaagggtccttgtgcaacacacacacacacacaacaggtgcttctgctgttgccaccagcagttccatgccatcccatctggctggggggagccctgaaagtgtctggatgtatctgaagctgctgtgctgggatgtgtgcagtactaatatgggaatgacagtgagtggacattgcatcacatagtagcctttcctcctaggaggcaaagcactcacctccccatcaccctgcagttatcctcatgggggagggagccagtccagtcccttgggaaggcagtgccagggccaggacctgaacctgcctttctgatctacagcagagtcaggctaaagagggcaggcagaggctcgccaaggggcacagtggagtgcttcaggactcacagttgctggggctgaatgctggaaacagcttgtcagttcaacccaggagatgctaagatgcaggctagagtcgatgacttggtcctcccatcaggggcttgcagaccatgtgacagtcagctggcactcccttgacctttctgttgagtccagaaaccatagtgcaagcagtgggctgaaagctgtggcaagctgctgtgttggcatgtaatttggaaagcctattcacttagccacctattaaacacctggtgtgttttgagtccccagtctgttttcttgttcatctcccaccaagggaaaagcaacattgaccaatcaaaaggcaggctcagtcttgtagtctcagtagtacagtcttccctgtggccaagacggtgtcttcagcatctgcagtggtgtgtgcagccataggttgacaatgaaatgcagggagccaggatcaggaatctgacctgcaccaagagctgtgggcagaacagaccagcatctgtgtgatgctgtggctggtggtgcaggaggccaggaggcatccaggagccagagggatgccttgcaggactggggtggggtggaggctgtgtctaaaatatgggatgaatgctaagaatcagaaagttagtgaccgcaggcagaagctcagaaacacacagcagatgtgaaaagtgctccttgcccctgctttttaaatgttatctgaatgcccacagtgggcagaagctactattcagtcaacaaataatggtcaagggctgggcattgttgtaggtgcatcactagttacctcagtgaataaaacagacaattcctacctgcaaggaggttgcacttttgtgggaagaagaaaataaaggaaaggagaacataaaggaaaaaatataaatacgatacataatattagacacagtggagggatgaatgcagggatggagatagggtgcttcagggtggggttatagcttttaatagaggggtcagggaaggtgttactgtgaagataacgtttgagcagaccagtgggaaatggcgaggtaagtgctgtggatctggggagagggcattcaagggagcaggagggccaggtgcagaggccctcaggtgggagtatgcccagcgtgtctgggagcaggagggccaggtgcggaggccctcaggtgggagtatgcccagcgtgtctgggagcaggagggccaggtgcggaggccctcaggtaggagcagggaggaggcaggtatggctggaacacagcaagtgctcagaggtgaggtcagtgaggaacagagggcacttagggtcttgtaagtcattgtgatgactgtggtgctaacttggggtgaagtgtgaagctagtggaggctttttagcaaaggagtgactgatctgttttgaaagagaatcattgctgggagcttctcggtgttggtagaagtgtgacggtcagtcaggaggctggatcagtaatccaagaggcagatgttagcagcttggaccagagtgataaaggtggaggtggagagaagttgctagatccttgatacattctagaagtacaccagaaatgatctgctaacagaccggacatgaggtatgaacaaaggaagagggaagatggactctatatcttggcttgagtgaatggaaggctggagagtcaccatgatccgagatgggcaggagctggttggggtgggggaggctcaagaattggggtttggacatgccaagtttgagatgcccaagtagagactgactgtagaggtctaggctggagcaggcagaaagacccaggatgtgcaaaggaaagagggaaacagcagcagtagcacttgttcagccaagtcctgcctcggagatcaaatgcataaaggaaaggaaatctcagagccagcctctaaccctgagcttaatcccaaagagcagcagagtagcctggggtatccacccctccaccccggtggtgctgcagagcccctgttgcactcacgggtggcaagaggcagggctcaaagcttacctcacaggtgtgactcccagggagtaggggtagggtgaggaccccgctggaactggaatggactctcctgtatagtgatgcctcctaagcctggggatgcctctgcaagggctccagggggctctcaaagaggagcaggctctgcctttctcagatcagccctctggctctgttgttcccttgggcctgtcttcagataaccacagtaatccagggagatgaaattggcagatcagaagcccttgattagacctgcagaatgtctgcactgacaagaactgcagaaagcatcccgttcaactccctcctcttacagatgggggaactgaggtccagggagatgatgggacttgtccaagttagaagcttcatgacctagggcaaatcacttaacccttgcaatcatgccaagttgagagcattttcctaaatgctgtggctcagagatggctgtgtgctcgtggttcctcctgtttctccctaaccctcttccacatgggttttttactgcccgatcagggtttggggaatgattggcagcccggaggccagccagcccttttggcaatccagtcaaatctgcccactggctgatgaaacatggactcccttggcagcgagtacttcctcaagagatatcttgcttaaaattgatggcccccctttggctttgctattccccatgcccttggtggggcagagagttagttccatcccaagttcttctccatttgccagagtccacctccaccccagcccagagctgtttgctctggcttgccctatcctgcgttggctcctttcactctctgcaaacccttctgtccttcccgttgtctgagctgcctttttcttgactacttcttaagcctctggatttctccttaaatatcagctctaggacgcctgcctgatgagctgaggtcattcctaccctcaagtgacctggtgaattaagcaacaataccagggattccaggacagtgagtttgaagatcagcatctttgctggcctgagggaggcccttggcctgctgggggtggatagagtgatgctgaccttctgcacaggctttgggagggaacagttagttaccgcaaatgtctggctatctaggtgaagcactcccgaccctctgctcctcaactgtagttgtgaattacagagctggaaacagcacacgggagcatttgttccactcctgtttcagggacaaaacttaggcctgggtctctaaaaccagaggtgcttgatgcttcatcccaaggctaaaggggcagatgccctctctatctggcgttgtggtttcctctacttccaccttactgcagagtggggggctggaacgttggcaaggatccaggactcctgtaccctatctcattctcctcccacacccctgtcccttcattacagatagtccaacctctttgttctgtggttgctgaatagcatcccccaggggaccatcttccctgcaaatgcagggtgacgctgtgcagtggtttctctgccatcatcttttctctgctggggatgccagagcataaacccatggtgcaatggaatgtgcctggtagcaaggatgaagacgcgggggctccagtgtgctccaccccttcctttctgtcagcctgagtgctcccgccccctttgggcctcagtctcccacagagagggagagctgggtggcccagcaatctctggagccccttttggctcagacctcctgcagttctctgtagcctcctggttcccagtgtatttttaaaggatcctgtgttatttatctcagcatctctgcccccctgcgctccacgctcctatccatgcagtaatgacatccaaacacccacactgtatcttaacaatctgatgagataaatgcctcatcgttgggctccgtggacacagagtagcaattctattctgctatcaaagagctcagaaactcaggcaaccaaggcaggatgagcaggcatgtggcttgccatgtgcccatcattgggcaaaaacacattctccctgccccaaagcccctgtttttccccaaagcagcctcactttttcccttcctccacctccagaacaatgccttcgagcctgctggcatttgagaatgggccgggcgggcagtactgggggcatatggccttgttattttgatggagctcctagtgggatgcaccagccactggccaggtcctggaaataattaagctgagcatattgacctgggggttgcagggccttgggcatgctgcaacctccaacacctgttctcatgctccttctgcagtgaccctctcgtgctctaggcacacctgttagatggaacctgggactttcaaggttgtcactgccagggctggcatgatgtgcttgcactcctgctccctttatggacctgggagttgggaaggtgcattgggttccaagagaagcaggaactgatttggtcttgtagtgaaaatagacctggctctggtttggtaagtgagtgaccttggacttagtttccctagaagcagaaataggataacagtaagtcttcccacttcaaggaatgttataaggatcaagtgagatcatgtgaaattcttaggaaagctgcaagggagtctacctatgaaacacagaggccatgggacacagagggaggagtaagggctcgagctgggcaggcctgggtgtgaattccagtgtttctcttcaggctgtgctgcctagggaaatgtacttacctcttctgagcttttctttgctcttctgtcaaccaagggataatgaagctacactgactggttactcacagtgataacaggagtatctgttatttattaaacgcttatgttgagccaggacctttcttcctttcctttttaaaacctccataaaatgtagccggatttgtaatcacacattacttcacgtggactttggctggtttgtgtagtgtctctgtgagagcaggggttctacgggtattgcccggcgctgtgtttccaaagcccagcatgtgcctggcccacggtgggcgcttaagaaatgttcatgcagtcaagggggtgcagctgcctggcaaggagaacccgggaaattcatttacccttcttattattcagttccttcacctgaactctctcaggctggagctgagctttgggttcataatatataattattctccccagttaaaaatgactaaactgaggtcaggagaggttaagtgctgtgccctagatcactcaactaggaactagggaacaaagccttcttgtacagtacttgtcagagcctccttggaagcttgggaaaagggtgtgggcaggactgggcagggaggaaacagctgagcacctgccggattcaccatctgcccccatgaagatacatggaatcctatctctcataacggcctccagccatgcccattttacagatgagaaactgaggctgagagggagaaagaacccgaagctcagctccagccagagagagttcaggtaaaagaacagaataataagaagggcaaatgaatttccagagttccttcatcccagagtaggatgctcagccttgccaggcagctgcactcagcttcccgccctctctgagcaggggggttggaatgtgtctgcggagggcagcgaggaaggagcctgctggaattccttccctgtggcacatctgggaggggtattccccctggtgatacttgggaaatcatgctggcctcgccagtccttttttccactgttcttttggtctcggagcacccgccaaacatctgacactgttcaggatcgattgcacataaaatgaagaatgggtatttaaaaaacaggtttttttgtgtgtttttccccctgttgtcatctaagaagcaggtttttaggttctttgattctctcccagaataacaaccatatggggcctccacttacactgagcagcctgtgccttgtgccagggactggtttgtttccattgtcagcaaaccttgactggctccaaacattttcacttcaggtggtttctgaaagagggaaagactgaggggaaagtgatgatgtggtccctctgaagagggtttagctttcaagggtatggcaggggtggggtcgacagccagaggggtgtgactttgagaagccaactcaccggcaggatccagcgagatccaggctcggtggctggaacaaagaatgttttgaaccacacggggctctggcatgtttgttgatcgacttatccaaggcctgggccagctgctcttgttccagaagatttcatggattaactccctgggctttggaaaattgtgtcttttttaagaaagggaagttttgaaaagcaaatgctcctgggcaggctgggggtgtggggagtgttggctggagtgggaggtcacattcgccccatggtgggatggccaagggctcccagcgagggaacagttggacctgtggtgtcctggggggagggttcctctgagggaccctaatggacagaggagtgtggacccctgagcctgggagcatcgtgggcatttagaccaaaccacgggaagggctccccaatgctgaaggttgctaggcgctgggggaggttccccgggagactgtggctagaaacaccatctgccaaagatgatttagttccggaagaggcaagggatagaacgagatggtcctttctgtcccagttaatcttggtgctgttcattccgggctgagcattcccttcctgaagtggaatggaagacagactcggccttgggcagactctgagcatcttgtgaaagggagagtcttacctccttggctttgtccccaccccctgcccagggtcggatgtcttgggtgcttgccggctctctgcccactgtcctgccctggcagcaggtaccagcaagcctgtgtgccgtgtgggttacagggagtagcgggcacatgattaaatactcatgctttgtcaaaacactgacagttacaaaatgcctccgcgtctactcagggaagggtgagcaatgaggaaaatgacttcaatatgcaaaagacattccaaggagtccgggagggaatgctcattctagagccaggagggagtcatgggaattagttcttgatttatagaccggctgaaagaaatcacctaggttaaacctgcctaaattctgctatctgtgtatgtgcttaaggggatgggctcaatgaactttgagactgtctcttctctactgatgggagtgacagtgaagttcctgatgaaggaaggtttagggtggaggaattctgagcccctgggttctggattcaaaatcatacacagccctctagataacatagatgtacagtcgtacagtctttgtggagaatttgaaaaacgagaatggtgattatctacttaggacaggtttgggtacagccactcatggaagccaggaaccagcttctaaccatggaagctttgtgttttctgtataagctgtccttgactacggacaaagaatgggtaccgagtgttcagttggcatcataataggaaacagaattctacacagatggttcaacggaacagagtttcttgaggggcatatttatggaggggtaaggagaccagcaagggatattgaggcacccagggctaaacttagagggaagctgtcatcaccctagggcctgaggaggaaggggagaaaatactgtttggggggcctggtgggagctgtagctgggaggaggaccatgagggagaaaccatagtcatggaaggatgttgtcactgccaggaccaagacaccaaggtagggggacatggaaagaaaacaccctgccttctctgtcctcccatctccactctcttattgacactgctcattggccaaaccaacctgaagctggagggccagggagccgggcacctcaagcagtccccatgcaccaagcttccagggcacggggtcagggaacagagggtggaaggggtctaggggagccagcagggagctggagctcatttgtaatatttgtcttgtttagccaactctagaaggctcgtcctgagaaggcgagcttcgaaagctattactgactcttaaagtattccatcgtcaagactagtgtgtttaccttgcaaactaccttgagccagctgtaatgaaattctgaaatgtctcccatacaccctccttctctgtgaaatgtcagctttttgagggcagggcctgattcttttatgagcagttgtcttgaatcacttcaaccctccacacctggagtgccttacactttccagaatgccgtactcagtgacccctcatgtcaatgttttgaggcttttgaattggtcaaggcaaccgtcttgctgagtggcctgagttctccagtgagagaacacgagtagtctctttgagtgggggccacagcactccagacgtggtgatggaaccctctacggtatagagagcccacggccatgccacccagccagacaggaactcaggaggccaggatggaggaagcaggagtggaaggtcattggactccctttctggtttaagcttggccatgggatgtcttaagtagggctcgtggtcctcaaatgtcacctccatcctgatgccacaatgtctgtattgccactattccaattcttcttttgggtgaagtcttactccacctgcggggagagcacatgaaatcattagcaagtgctggcacagacagccattcccctctctggccaggctggaggggctggatggtggtggggggtgtgggtgaagtaagcatgaaaggggagatgaagggtgtctagacactccctttgccgagggctggtggcctgttgcttgctctctaggacaacgtggatctgtttggggtaatggcagacacttttctttcgcatccagctgtctcttcctcttctgagtcccacagggtcctgggcccgataggctctgtcacctccagccagtattgggtagccacctgccactactcaggccgggttggaagggcctgtgaggggtggggtgtgggatccagttcatggcttccagggccaatttgggtgaaattcagttgttcttcgactcctgtgtttctacttcccagtttcattctaaatggaaaacatttctgtaggtttaagtccaaggtgcagccccagagcgggtattttcccttttgagaagtggaggctaccctgagccttgggaaaagtactcagagagaatctcccccatgaggcagtgtagcttaaggagttaggtattctgagtacctccaaaggctgttcgctctttccattccagctcagactgcctgagttcaagtcctggtgttgccacttactagctgggtataagttgtttaacattttagttcctcgataccctaatctataaaatggggatgaaaatagtgtctatggtagggaattagtatgaagattaaacagtttaaattgtgtcaaggccaggcatggtggctcactcttgtaatgccagcatttagggaggccgaggcaggagaattgcttgagcccaggagtttgacaccagcctgggaaacatagtgaaccccatctctacaaaaaaaaaaattagcagagcatggtggtgcatgcctgtagtcccagctacttgggaggctaaggcaggaggattgcctgggcccaggagtttgaggctgcagtgagctgtgatcacaccactgtactccagcctgggtgagagagtgagactgtctaaaaaaaaatgtttaagtgtgtcaagtgcagaaaacagtgcttaatgcatgccatgtgccatgcaaatgtttgctcttatttatttcaagaagcatactcttctgggcagagcatcctcctaggactctggagagatggagcatccgcaaggccaccaacgggactagtatcccccagtgttccccaagcatctcttccatcgagctattgccttgctcacaacccctcagtgagttgcttgtctggagatgcaggccaaatcaatcctgtctacaatctgctgtctggctgtgcccattcctggccacaaaccctctgcttcaccaggaaaatctgtttatgggccccattctcctacttgttttcacctctgccttaccctgcctgaaaagctctccttcctcacctttccctccaaagcctatccattcttcgattccagctccagttctgccctgaaggcttgtccatgcctgtggatcaccatcctctgcctcctgcctcctcctgcttccccggctggtgtctgcctcgtatcatcagtcacctcctcccaagcagcctattgctttctctactgatgccttgagccggaagccagacagcagatattccaaaactgaaaacctgtggatttgcctgtaaatttgctataatttcttaagaacacaagaaaggctgaacttcctggaagttattcctagggccagcatcatgggagtttgacggttggctgtgtagagcagtcactccaaggcagttgatttgctttgttgttcttctcaccccatcagtattataatgtggagcttcctctgcattgtgccgtgagatgacagcaaaagggctgtggccactgcctgggacttgatccttcgctgaaacagggacactttctatgactagtgctacgttacatttatccgttctattggacacatgttcgtaggcccaggatcagaataaaatagctccacagctagaagaaatcagtttataggcaaacaagactctgatgttggcccttaaaaagaaactgctcatattacatattacagtttaattttgtccgcgttagaaggtcccagtgatatctttgcttcttgactgtagtctagtgtttaaaggttatttgcccaggtgacttttttatcttttccaatctaaatacagttgtcccttggtatccacaggtgattggttccaggactccccaaccccttggataccaaaatccttaggtactcaagtcccttgcataaaatgcatagtgttttcatataacctatgcacatcctcttgtgtaccttaaatcatctccaggttacttatactacctaatacggtgtaagtgctatataaatagttcttatgatgtactgttttcatttactggtatgatttttattgtcatattatttttattaaaaattttcttttcaaatattttctatctgtggctggttgaatcaccaagaatgcaaagggccaactgtatcaacagctcaaagtggagagcccagggcccaggcacggatcattaggggaagtacagggctggcagagaagaaactggactcccagagccggctctttctgtgggctgggagctcctccaggctgctgggttaggaccagcaggacggccagaaccatggagacatgctgctggttttggagatggggagaggcatgtgaccttttctgggaatcaaatcagagtgaaaccagaagaagaatctagacttcttggggtaacttggcaaacaaagctcagatagacggaggggtgttcaaggaactttgcacgatttcctatgggctaagagaagacgcttgcaaatctgaaagggcaacatagggaaagttcctacagggaagggagacggtcaaccccctctccctgaccccgggcttggttagggggcagagaacgggagggggtcaaggaggctgtctgtttccctcagtgcaaatgcctggacagcacgtgtgtgcaggctgtgcccctgacctgatgagcacctgatgggtggctgttgaccgactgtccatgcaaggggtgtgggctgtgcttggcagcctccagcaggcagggcttgttcacctgcgtcctgtccagcacgcggcaggagctatcctggcctcagtgttaaaaggtggccctgggtcgaaggagtggcataaggtcccacttgggtgcttgataatgatctagagcctcgtgcccttatcttcacggcctcctcgtttatggcagcaagtcctcgtcctgtgggccccatttctaagctggacgtccagcagttccctcagaaagtgctgtggggcccaggcgtcctctcagaggatatgagcactcccgagtcgttctcactgcgtgtgttcatttcactcactgcctgcttccttcgttcagctccaagtacctgctgatgtttctgagctaggagggcttccttcaggtaataggggaagcatgatctggaaaagggaaggtttccttttgccccatggagagacgtcctgagacacttcatcaaccaggaaggctcccaggcagccactgggttgcagtgaaagttttcagccgctggtgactgctctggtgagacttgtgagagagaacagtgacggtgagcacagcagcccctcagaaagcaaaccagggagtggcttcccgacgtgcacggtttctaattcacacggtccctgcataagctaggcattcctgtatcctgttttcacatgaggaaactgaggcccctggaactcacgtagtttgcccaaggccatctaactaggaggccgtaattagtgaagctgggatttacacctagggctgtctgattccgaagctgggctctttccacggtatggtctgagggtgcagtctagagcggggactgatggggtttgtctgaaggaacatgagatggtggagttccaggctggctggtgtggggccccggctgggatgagacagtgtcttcaagtgtcagggatggacgaatgtccctgtcaggagatgttggtccctggcagccaggcatggtggcagcactcccagcctggcctgccctgcacaaaccttcaggcacacaggcctcttgacagagtgatgattgggattccatgcctgcaccagtggtgggagagatgcaggtgaaacaaggcggaaaggaccgtaattacctcctaacaggtttccacatttctctgctgtcagaatggttttgttttctgatttattttgatctgcttgaaaattagttgtggcagtgtgtttggtgtgtaatcattgtcctgctagctagcagtcatcatcagcaatgttagcccggcaaacgtgatctttctttcctttgcccaatacatgtcaggctctgtgtggcaagggcgagggagaggcatgactatgtgtctctgcctgtctgtggaccccgactcctcaccatcacccaacaggggacagtcctgctggctgtgtcttcccggaaggctcgtgcccgcacagattgtctggtgagcccgccagctgtaccgcatcgctctgtgcatgtgacctagctctctcctggccccctgttccatcccacatgcagcctccgtccactgtcccccagctcgcaacccccacgcagccccacccttgacctgccacctccatctgcacctgcttgtggagcctgtgtcatggaagagaggtggcctgaccactctaagcccacagcaccactggatctttcccctctctctgtgagaagacggccagtctcagattggatttgaccttttcgcttgtggtcgggccaggttgagcaggaaaccatcgttagggcacggaagcataggtgggagaagacagccagcactgtagagtggggagggctcagtgcttccacgggtggatgttcagcagcaggccccctctgttctttggtgaagcttgtctgcagcgagccctcaaaaaacatgggttttgagccagacggaaagtcatcaagcccagttacagtcatcccttggtgtctgtggggagactgattcctggacccctctcagatacaaaacccaaggatgcccatgtccttttatgtatgtagattatatgcacatactacaccattttatgtattttacatatggtatattttattttttaatttgtataattttttaatgatttttttttcctaatattttttacccaaagctggttggatccgcgggtacagagggccaactgtatttcattattcagagcagaaaactgagacctaacacataggcaaggatatgcttaagaactactgttggttggctccaggtctgggatatgaacccgaatctctgttgcagtctgtccaaaagtgggctgagctggtttcaggattggagcagacagctgtccatgtgctggaatttgagggatctgccatttcctccctagaatttctacctttagcattacctttgaagtaagtcagggattaccaaacatcttattaccaaagaactctttcttcccacatgacccaacacagaacagaaaagagcagagatgcttttgttcaagtgcatgggaaagaatggatgattcagagctgacctgttcagcttctcctgattctccagcgaggtcccttatgcttcttgctagaacctttagagctccatggagtatagtgagaaatgtttatggcctctattaccagggcagatgaataggtgcagacgttaacagcttctacaccttaattagcatgggtgtgtttagcagagtaattgagatcagagactaggttgataaaagaatagggttcccaacaggatagtttttgattaaggaaatatttggagcactatggaaatgcttgaaacataggaagggcaagttcagctggagtgcattgggatgacggagggtggggtagcggggtagggtgagaatcagggcagcctggaagctggggcctgaatcactggggcagggaccagggagaccagagagaccagagaaggtctcagacataaactctagctactccataaaactacctggagcatgaaaatcccagcgcctctgccacggcctagactgctcatcacaggggttgcaaagtcacaaaaaagatgatggcattgagctttcctatcaggaactatgtcctcaactaatattaatagctgacatttgcatagcacttcacagttaatataacactctcatatgttaggtgcttctcttaataccccttgaggtagctattgttattgttattattatccttcttttaaaggtgtggaaacacagggtcaggggccccgtgagccattacttggaaacactgtcattaacaattacttcttatagttgtttctagcaactcatgtcctggaaatgtctggtttaattcatctctctctccttctagtagacagacagacagacagacagacagacagacacacacacacacacacacacacacacacacacacacacacacacacacacacacacacacacactgagggctgatagggaagaggacttctcttcttgattctccatagctgtttcccaactgttgctctctaacaaaaaaaccccttcagaaccctcagccctgctcagaaatctaaggaggcttcaggcagcaacagtggggtccaccccaccctgaagggctgctgcaaagatctccaggaggaggcccccaacaccattcctcttgaaggtcccagttcagtgcggcttgagtccttcacctctgagtctcagccaggcaacatccgaaggagctgaggaagccttctctctcctgccttctctacctcacaggagatggctcctgtcctccccatctccctcccaccataaccgctcaccaaaaattgacttgttttctctgatgctgctttattgcatgttaatacttcattactggacctgattctgttacactcgcacagagcaagcagagcagagggtcctgagcatgcggcattagatggagaaactgcctccagtctcactcatcgtgctgagatgggttgcatggcacaccactcttagcacagactgaggctggccaggccacccatgctgggtgctgacaggcctcaagcctgcagtgagggccaatctcagtcctcatgatctgcactggggacagaagccatctgattttaaattccataggaataaaccaatgggtggagtcaccaaatatccagatgttttctcccagctttcatatctgccatttatttttaaagatgttttaatggactaggtacaattttcatacataagattcacccactcagtctattgttctatgaatttttaaaaacagcttatctgaggtataattggcatataacaaactgcacatatttcaactgtatactttggaaagtttcaacattgaccatcagtgcaatcaagagggtgagcatatccatcactcccaaaagtttccttttgcccctttgtaatcccagtagctcagccctcctccccacccctgctatctcttttctgtcatcatagattagtttatattttctattgttttatatcaatgaagtcatacagcatggactctcttgactgccttccttcattcagcataattattttgaggtttacacatgtctctggatgtactgatagcttattcctttttattgcttagttgtgttccattgtatggatatagcacagtttatccatccatgttgagctgtttccagttttgagctatttaaataaagcagctatgaacatttgtgtataaggcttcgtacggatgtatgctttccttttctcttgggtagatacctgggagtggaatggttacatcatgtggtagtgtacgtttagtgttttaagaagttgccaaactcttttccaaagtggttgtgccattttgtgctgccatcagcagtgtatgagagttttggttcttctacatcctcaccaacacctggtgtggtcagtatttttaattttaattttagtcattataatgtgtatgcagtggtatctcattgtgttttaaatttgcattttcctgaagactaacaatattgaacatctttcctgtggttattggccactcgtatattttttggtgaagtatctgttcatatattttgcatacattatatttgggtcattttcatattattgcattatgaggtttctttatatattctggctggctataagttttttttaaaatcagatatgtgctttgcaaatattttatctcagtctgtgtcatcttttctctctcatctttgttggaagtcattttccatatatgtgttggtctatttctagaccatctgttcagttccattgatccatttgtctatttttacaccaataccacactgctttgattactatagctttataataataaggcttaaaatcagatagtgctagttaccccttcatctttgtgatttttcatagttgtttggttattctagaccttctgcatttccatatgaattttaaaatcagtttgcctatttctacaaagaaaagtgtttgcttcatgtatttatttgaaagctctgttaataggtgcatgaacatttaggattgttatgcacccttgaagacttgacctctttgctgttttgaaaagccctttctaatccctagtgatagcctttgcgctgaaatttattttgcctgatattaatatagacagtccagtgtccttttgactgtgttagtatcgtatagttggtcctttgtattctcaggttctgcacatgcaaattgaaaatattggaaaataaaaataaaaaatataacaaaaataatgcaaatgaaaaatacagtatcaactatttacatagcatttatattgtattggtttttataagtaatctagagatgatttaaagcatatggagggatgtggataggttatatgcaaatatcataccattttatataagggacatgagcatctgaggatttgggtatctgtggggcaggaggaggtgtgtcctagaatcaatcccctacagttactgagggacagctgcatatctttttctgttcctttactcttaacctatttgtgtctttatatttacagtggatttctcataagcagcagatagatgggtcttgctcttttattcagcctgacttaattggcatattcaaccaatttgctgttgatgccttgctgtgcttcggtttaacctcttgatactttgctgtgcttcggtttaacctcttgatactttgctgtgcttcggtttaacctcttgagaccttgctgtgcttcggtttaacctcttgagaccttgctgtgcttcggtttaacctcttgataccttgctgtgcttcggtttaacctcttgataccttgctgtgcttcggtttgacctcttgataccttgctgtgcttcggtttgacctcttgataccttgctgtgcttcggtttgacctcttgataccttgctgtgcttcggtttgacctcttgataccttgctgtgcttcggtttaacctcttgataccttgctgtgcttcggtttaacctcttgataccttgctgtgcttcggtttaacctcttgatactttgctgtgcttcggtttaacctcttgagaccttgctgtgcttcggtttaacctcttgataccttgctgtgcttcggtttaacctcttgataccttgctgtgcttcggtttaacctcttgataccttgctgtgcttcggtttaacctcttgataccttgctgtgcttcggtttaacctcttgataccttgctgtgcttcggtttaacctcttgataccttgctgtgcttcggtttaacctcttgataccttgctgtgcttcggtttaacctcttgttgttttctgttagtcccatgtagctttgttcccttttccctctttttctgcctccttttggattaactgagtatttttaaggattcagtttcatctcttctgttgacttattagctaaaatccattgttttgttattttaacagttgctgtagggctcatagtatacatcctttttttattatactttaagttttagggtacatgtgcacaacgtgcaggttagttacatatgtatacatgtgccatgttggtgtgctgcacccagtaactcgtcatttaacatgaggtatatctccaaatgctctccctccccccgcccccaccccacaacaggccttaatcatcgcagtttgtcttcagttgttactaaaccccttcacatatagtacgggaacttcacaatagcacacttagatcactcccttcctggcctttatgccgttgctgccatacatgctaattgtgcatttgttctaaacctcacaatacattgttactatttttgtttaggcagtcaatgatcttttcaatgaaaatcatatatacttaaccatgtcagtaccatttctggtacccttgattcctttatgtagatccacacttctatctcatattattttccttctgcctaaaggacttcctttaacatgtcttgcagtgcaagtctgctaggattaaaatcttttagcttttctatgtctgaagagaagtctttatttttcacttttatttccgaaggatatttttacttagtatagaattctcaggtgatagtttttccttccatgactgtaaagctatgattccactgtcttcttgcttgtgttgtttctaataagaaacctgctgtccctcttgtctgttccactgtacctaaatgtgtctttatgccctggctacttctaacattttctcttgatcactgctttgaggaatttgattatgatgtgccttggtataattcttttttcatgtttctagtgcttggcattccttgagcttctggaacctgtgggtttatatttttaaaattaaaattgataaatttctggctattatttataattttttttttgcttctccccccattcctgtgagaactctaattacacatgtattaggctgcttgacattgtcgaacagatcactggcactttcattttatttaattcttttttttctatgtccttcattttggatagttcctatactatgtgtttatgaatcttctctttttttgccatacataatttgcctgccttcttccctccctcattccttatcttccttcctttagaagaacctagggggatttacctaattttataatgattattatttcagaaccaatccagagcttctgttcccaaagccaaactaccgattggagattctggagggagggaacacagggggtgacattcctggaatttgggggacttcgcaggacttgacattttagaggctggattagggtacatccaatttctcctgcttcctccctcttcttctttcctatccccaaagtaaggagagtcctgtgagcccaaaggcactagacagccctagcacactcttggcagacagggctgaacgcccggatttccctctcaatagggaagacttagggagcctctcacaggagtgagacaggaacagcagctttatggaaactgagttccaagtcaacacccggaagaaaactcaggctcccctgtaggcctggaaagctttgtctgagacaatgaccttaggaggaggtcaccaaaaccactccttccctcacagctcatgggatcagagtcagctgtgcctgctgaatgagtggtcaggtacagcgcacccgcctcctgccagagaaaaggagacctgcagtctggctgcggcaggtctcagcagaatctttagctttcttcaggcttgatcagccacctcaagacctgtgctcatttaaagaacagagagtacatgtaagttaggaatgttctcgacttcaagtaacaggatacttaaggactctgaattggttcagcagctcaagatgccactgagaaccaaggctctttctctctttccacttccttatactaagtctgttggcttttcatattcaagctgatttccttatggttgcaagatggttgtcaatggggctccaggcatcacacccccattcaaggcaggtggaaccaggaaggagtggagccaataacactctggcccttttttttttttttacataaaacagaggctttcccagaagtccctagcatagtacttcttgaatttaatctacacaaggatcccctgggaatcttgttaaaatataggtttggatgtagtagatcttgggtagagcctgaaattccacattttgatcaagctgccagagtgtgtcagtgtggctggaaactgcattttgagtagcaaggtgcaaggctacttctccttactcttagtgacacaatccaattaactagctacaactggctgcaagggaggctgacaaagtatcttacctttttcaggggagactttgggtagcaaaccaatatcagtcacagaattctactgaaaatgcagggtatggaagcatctgaagtcacaaggttgggctggacaaattagagccttcacctccatgagggaagaccatggaccccttactctatatccacactcagcctgcagggacagggcattattgccacgagccagtctgtcctgtatactcactggattagggattccactttcagaattttatcaccttagcacccagcacagtgcccggtacacagcaggtacccaatacgtgtctattacactgaaatgtttattggcacatggtctaaagacagtgccagggaatcctgtgaaaatgcagtgctgattcgggagatccaggatggggatccaagatgatgcatttggaacaagctcccagaggatgctgccgtctggtccgaatcctgggccccactttcaatagaaagggcctaggacatgcagagtaaagtccttcctcctgagttagcagcagctacttgtgcttcattcatgcaggcatgaagctgcttgcaaggatgttagcagatattagatatggctggtggggaggagtaaggagggccttggctatgcctttttccaagatccgggagctggatgctcagagatctcatccctggcttccttgtccactgaaaacaaaacagcagtatacccgggtgaggagagagaccagccaagcacgtctttcaacaactcttaacttgcttggctccagccacgaaacaggaacccgccatccccctagctcgtccctggccctcaggaagtgctgaggctctgccgggctgcatgagtgaggggccgatgtctttcagatgttggggcttcagcgggggagtggggtaagctggggagagggagcatttttttgtgaatattttacccacggaaaaagctgaattctctagaacagacctctagatttttttttttttttttggtagtgggaagtgagttactggaatttcttctgaattcgaagccaaacaaagtttcttgcggttttagttacacaagcggctgctgccaagatggaatgaatgagaagagccactgaaaggaagagacagtgaggggctgggggaggagggtgcagaacaggacccaggcgcagcacagaacagccctccaggcgggcatactgcccgcttctatgctgtcaactctttagggagagagctcactgttctgtctgcctcccaggatcagaattaaaaagaaaaaaggtctgtgaaagtgaggcatacactggcagacacgcacacatgtaaatgattatcattgctttgtaatttaccataattccggcctgtgcactctatggggtcctgctttgttcagtttcctgactgagtggcagttggacgagacacttctgcccctaagctgcaggcaggcggctctcatttcagccttgttccagtgtgagtctgcagggaagggatgcccgctgctccaaggggaagcaaggataattaacttctaccagtgatccccaaacttcattttccttagagcctgaagcctcctccttgttaccttcctggtagccacagaatgggccagggccatgtgtctcctttcatttctccagcctgccctctggtgggcgatgcccttcagtgagcggggcctggggtagggccgttctgcagatcctgggttggcttccagtggtgcctggcatctctcctgctctctgggaggagggacgggccgctaagtgctgacggcagcctgtcactcacaccttgctccctctgtagaaacactctgtttctctccattccatccctgcgtgttacctagcaggaatttcctcttccttgggtcaagcgggtgggaagggctcatgattgctgactgaactcaaccctttacactgggcattcaatgtcatcacattgataacttgaaatgggcagtagtgggaacatttacaccacaaaaactggcatatgctacacccagagctttccttccccctctcctaaaagccagttgctaaaacatttaacaacataccactggctggaaccacttgtgaaggtgacgtagggctgcagggagagcccaggtagtggaggaaatggcagccttccttccttgcccatagcctgtgccggctacaactcaggagcttttggaacttaggagctctgttcttaaactctccttaaacacctcctcatcccagacgggttgactttcaatgagaggactctgctgtgccgcagagctggaatcactcaaagcagagtgatggacgagacttactttcgacgttcctaggctcccttccaccgttccctggtctccaaaccccatgttcttatctgacggtatttctactctttttctcaacctgttgctaacgtgctcattcgagagaggctggtgcgcacctacccagcggctttttgggcggcagtggaagggagtgttttattaggaatttacgttatatgtgcaaggaataccacatggatggtaaagttcagccgttttccactgaagatagggattcttcaaactgcacagcttttcaggccatttcgtttaggcgagccctcatgttatagtcagggagtttgaggcccagggacatttcccaggggatgaactctaactaaaaatgaaggtctcctagtcctgtcgcctgttttcttcactcagctgtttaaagggatgttgcctcgtgtgaattatggatgactgccagagttattagaatgaacagagttaccaagagctaaatactcgtcatttatacctggccggttctgttttcagttgtcctttttctttgcaaagagctttgaaacaagactggcctgcttgaccttccatttagagttaatgtcaaagcttgctgaggcctgggaaacaggtttggttgtttgcattaaaagggagtaggaagcaagaaccttaattatcctaggctctggcctatttaataaggaatttgagaagatgtcttagtggctagtattcctagaacataatacttgaaagtggagcgagcgggtgaaaatatgccttaggcaggaagccagataggaagggccagtgtctacaggctctgcacagtaaggaccctgtgggaagatgtcacaggtaacagggcctgatggcccagcacccagctgctttgcagtagttctggcttcggggcttctctgggtggctgaagaacaggtctgtgaggttcattcgggggctcttgttgatcaagtgtggatggtgtgccggacacagggctggggctgcagagtggaggaggcgcagtccctcccccgagagcactgtggccagtggaaggagacaaacaagaaacaatgacaggacccaggctcaggctgtcatgagcagccctcctctggagagtgggaaatgtgcgttgggaactcatgcttacaacttttatgttttttcttactgagcaatgctcataacaggagaaaggatttcttcactgtcccaaaagaatgtgcctcaggactgaaattggtagtggccctcccttactcatgtgccccaagcacattggaacgccagaggaattttaagcagatttttattcttgttttctggaggcaaaatctaaagtgaagggtgtgtgtggagaggtcatgcaagaaatttggaagctgtgtgccttgtctggctgactgtcccaattaccccgggcccagaggtgggaggtcccacaggggcctgcccccagttgacagagggctctttaccgttaggaccccttctgggtttctcaaattatggcttttcctccttcatggtctcctggtacttttaaccccttctctccatttttcccaaggaatattctagaggaagggtttctgggaatgaccttcccaaggggagggatcgggcaagtattgagtcattcctgctcgtctggattgtgattgcgacccgtgcctcatggagtgtcgctggatacgcgatcagtgtcccttgaggcagtgctgcacatggtgcagttccagagaaatgagggaatgagaatgaacgtggctgctcgtgtgttccgtggctgtttaggaaggttgggtcagtggagatcagggcccgaagagcagtttcagcctgcgtggtcttgatgtggtcttggctgatgagaagctccctccaattctgtgattctgggtaaagcagaccatgtgccatcgggagtgctcctgtgattctttaagttagtaattctcatccctggccacacataagaatcatctgggatcatttaacaaaaaacaatgccaggatcctacagtctactccacgcccttcattttcaaacttgagtgggcaccagaatcacctggaggatttgtgtaaacacagattcctgggctccagcttccgagtttcagtggctccaggatggagcttgagaatttgcatttctaacaagctcccaggtgactcgctgctgctggcctgggaccacactttggaaatcacgattatgaacaggaatcagaatttctgaagatgtggcctgggcatctgaattttttcacattctccaggtgattttaacatatagctctggctgaaaacgatttctgatcattgatttttttttttttttgcatcatccaataactattcattggtcagactgtgtgctaggcactgagttagagttgaagaccctcaagaattccactgacaactgaatcatcaaagggaaccgagccctgcccaaggacatacagttgttttcctcttccttgtcctttggagaagcacagctgaagcttcctgcccacaccccagcccctcctccttgagcatgaatgtgcagtaagtatgagagcctgtcatttaccctccctggcctccctctccagccagcttctctctgaggagtgaggatttcttgctaagtacatgatgatggcctgtttactttgctctggagtttgaggctcttgcgcagattctgccttcctggacagttcaggaaccaatcaaccagctggccttggcaacctagaaagcatggtcagttgccctgaaataggttgattgcaccccagaagtgcttttccgcctctccccatcaaaggtgtttgcaaccccattttccctctgagtcagcttgtccattaatgggtttgtgttccttgatggggtctgtttttccagggtcttgaggagtggccctttccacccagtttggctgcggggctgagaaggtgcccttgcattttgtattgtgtgtccgtggtgggtctgtgcctcccttctgtctgttttccctcaggaccacccaccgccccatgcttgtatctacaacagctatgaggaagaacatacagattaatcaccctgctgcgggatgccagctacccagtggctctggcagccccagtcaatggatcctgcagtgtagccttcatcagtagagctgccactgccagcacccaaaaggtagcactaatatgcatgtgtgacctgaaaattacaatgtaaatggtggggcaacacatgtataggaaggtaaattttaattaaaagtctgttctccaactcagcctgcctttaaagatacagaaatgccaagctgtcaggctgccggtcgggttaagagggttctctcgtgcactgtggaccaagctgggagaactagggcttcattgaaatcggatgcctttgactaattatgcaccaaatgcatcccatatggggaagatatgccctcaggtggttagcagagccagcaggagccaagcttcctgaaaaatgctgggtcttctctcctgcagtgtcagggggtgcagacagtacagagggagggtatgagagtcgaggcacatgccaaaaaggagcaggtgggaaaaaagagcccatggcccagcagcaaattgtgtgtctttgagtggatgtggcttttgaggcactatgcccaatagtcatcctgaatttccttcactgcctggggagggggtggatggaggagggaaactagccacctccagaggcaaccctgctggacaaaactcacttttagaaccatcagaagcccattttcctgtggaaatctacggggaagagatagagaagagctgcagagtctattaaatgtgtgcttgctgcctggtctccggtatagtcaggaaatcagatttgtacagtggaaattcattcatgccacaaatatttattgagtgcctacactgtgctggtggtactagggactggggatacagcggtgggtgagataaaggcacgacgccctcaccgagacttgtgtgccactggagaacatggattaaaccaggcgttacgtgatcagtgtatcagtgccatatgggcaatgatccaagctgccgatgggtacacaccggggacacctagttcttaagtgactttttaggatcccaagtggtcagaacagcttccctattttgccatttacatgttcacattcacttagctcaagttacccttctgataagaggaaattcgcgtcaagtcacatagaatcactgaatatttgcacttggaggatcacctggcctaattcttctgctttacacatgcagatgctgaaggagagaagttaaagaacctgtccaaaatcgcacagctagttagtaataaagcttgggtggaattctgcttttctgactcccagattagtatttctttgactttacctcccctttggaaaaatgaagcgattcaggggaagttcctgggcatttatggccaaactgccctcgctctgaagattcaatgttttaattggcccggcagagctggagtccacaggtggtaagcatggacaggtggagagccagcatcagagagagcctcctggccagcgcctgccttgcttcacagatgtcaaggcaattggggattgggggcagggtatgataaagggcatcaggaaagtggcagtgctggggcactgtcctctgggcctccctgggctcagctgggcaggggcgtgttttcagagacaatggtgttgactccctctgggcagccctgcagggtggcagtcccacaacagaaatcttggagcagatatgttggaggatatgtataagaatgagggattagtgctggttgggggcagaaaaaatgccctcttggggagaaagaaatgatctgtgacaaaggacttcctttcctaaccaggcagactctggaagatgaccacgaggctgggtgggaaggtggcagtggaaacgtgattaattgtactgtccatggacagtgagccgaggagcttgtacctggctttattagagacatacactcggggctgctctacccagaatccctcctgctgcctccagggctgctccactctgtgtcttagagatgagaaaaggagtcaaggactcctaccagcgtggaatggtaacctctggaggggaggtaggtctcccagggatctgagacgtgttccaggaatggaattcccagtatccttggcagtcatttcaggatcttggggacctagggatgctgtctggactgctctaaaatagcccttctgtggcttcctcaaatgtattgtctgaatcagcagcttcaaagtgatatcagggggtttacagcatggatgttggagctatgtagactggattcaaatccccagttctaccaattccagctctgtgtgcagggcactagaacttgctgagtcctagctcctttgtaatatgaggtgatggtgaatatgtcgtagggttgttgcctggattgaaagtaggtaaagcacctactagcgtgtctggcacctgggaggtacttaaatggtaacccttattacaacaaaacaataaaaggtccttccttttaagccagaaaagttatttggaaatggaacagtcttttaatgacggggacttaaaatcccaaaccaccagccaaaacaatcaaaatggaacccagacggatatttgctcaagggcccctggcttctcaagggcctactccgccgcagaatttgcctgcaccacctactggtggtttcttagaactacacactctctttctcgactgctctttggtgagcaggacaccaggagaggcagggaggaaaggaaggtaactagtagttttgcaactgttttaattacttcaaattgagatgtttgtaaataagatgttagagtctggagcttttgttcggtcttgtgtttagcgtaaatatagttttattgaaactcgtcacagaagtaccctgcagtggagggcgcaggatttggctgtgacggagcagagctagaggccacttgcaaatggcagcgtttggaagtgcctgttctgggtagagcatccaggctgcttttgattggctgtttgtccctcccacgaagcaagaaaggtgaatgtaaccagcccactggaatcggtccttttgccattaacgtcacctctgtttactacgtgggaagagtgattcacatgcaggaagaagaccttttccagaaatcctccatcagctagaagaagagagagatcctaattagggagccatgccacatttcattctgagattttgtttggaagcatttttccaactgagaaggtaggaaagggtcgtttaagtttcccactgttctgttgggcttaatgacctgcccaggtctcaggctgctctgagctgagctgtcagtgagaccagcaggaggacatcactaggactggaaatagcgtggagtcaattgacagacagccatgaagcactactaagtgccaggccttgtgctggctcccggggaggcaaagaaacatagaacatgaccttggtccttaagaggttgagagtttagtagacaagagaagcctgtgctaaatctgtgtacaatagtgagtgaagcaagtgctgagtcctagtggacaggtccatcctcttgtggaatattggagaaggaagcatgcatgtgttcagttagacacagtttctgacctccaaggtgaaggttcaattccatgcacgtttattgtgtcccattttgtataaacagagcacgtttgttgatattctgaggtatttggagaaggacacagttgagtaccatttttcagccctttcacattgtgcagtacagaggtcaggagcactgtttcaggaatcagacagcccacgtttgaaacctccaggacttaccacctgtatgtccttggtcaagttatcaaacctctctacagcttcatgtatccaatcaacagacgtttactaaatactgtaccggcactggcaggcaggctagagggactgaagggatgtgcagaggttggtggagagggtgagcagggcagagactgagtgtgtctaaggaaagctgccagctttaggcggcctggggagcttctagttctcagccaatctcttccctgaatgggcagcctatgggtgaaggtccaagtggggatgtggctgtagtgtctcttcctgcctttctcccatgccctgcggcaccaggcccacactggagtgctggtgggagcctgcatgcctggttaaaggggcatgccagagagctttccgtaattgcgtcctttctttttttttttttctggtgtatttatgagttttaaaagccccttggcaacccaggaaattccatttccctctgcagctcatttataccttccttgatatatgcccaggcacaaacacttgtgtgtattatttggttgttcacggggaatcttgtaaaatctgaggccttagtgggtgcacttcaggcttgagggcaggagagggaaaggagcagaaggtgagaaggtaacctctggcaaggaaacggtaacacttttaaatctcctctgaagaccaaaagcaaaagaaatgggctcaacctgtagcataagtgtgctagaatagacacaagcaagtttttcctgatagatgtcaaatgcctttttgcctgttcacaataagcttttatacatatggccaattctcatctgactgggacaagatgcagggagtggaataaactaaatgtccagtgtgcgtaattggtgttgctataattaatatttttcagccctgtgactccatgaatgcctctaacacctagagcaggcttgtccatcccatgggccactggccacacgtggtccaggatggctttgaatgtggcccaacacaaatgcataaactttcataaaacagtatgagatttttcttgcatttatttttagctcaccagctatcactagtgttagtgtattttatgtatggcccaagacaattcttctccttccaatgtggcccagggaagccaaaagattgggcatccctggtctagagccttccacagtttgacctttagagtatcttgctttggcttattctttttcatatgtatgtacttcattttccaaaccatattatactcttatcatttttatttgtatccctaccacggcctaaaatagtgcctgaatatagtagacaataagtgtttgatgagtgactaatagataacagcagcttccagtgtctgccagtgcttacactataatttatcatttttttcttaaggtgacagagaactcttgtaataactctaatagcaagtcttcttttgtgctaatatattaattgaatcatttattaactttctaataatatgcaccagccactgtcaggcactagttattcaaaggaagacgagacacaaccctgaccagacatgaggggtgtttaccatccacctgggagatgggcatataatttaaaatgaaatatcgattggtaatatattaatgaagagtatatattcataatttaggacagaggaagtgctttttgcctggccttaaaggggagagtttcggggaggatgtatttgagcttcatcttaaagacgagcaggagtcagcgagaagacatggcagcggtggtgggtcctggcagaaggaagagcgtggcccatagcatgaggcacgggtacggttgtgcttggggagccctgaagaggcggctgctgaggaaggtggagctggaaacgtagattggagtcaaagcacgaaggccttgaataccctgggcagaagctgagcaggcagtcagaaaggccctgaggagactcggaagggtcacctggggcagtggagagtgaggggcgggggaggctggccaggaaccatcgcggtaggcctgatgtggtgggggaaagattcctcttgtgcgtgctgtcgggatacatcatggagcctgaagcatgccaagaaaccaagcaagggagcgtggcctcaggcttgccatccgagccatccaagccagaggaacccaagtacagctgcgggtgaaatggctttgttagttaatatgtaacatgtcgcctcaatattgagcatctctggcagccgctgggactgcgggcgcgttgttggtcacactgacccagacaagtagtcaaggcagctttcaccacagatcaagcaagagagttggcagtaggtggggcagggtggtctccgtctgtgtgcacatggtgctcagtgagtcacatctgctccagttgtgtaatctccgtggtcagtgaagcaatgctgtgcgcacagttctgtgttgtgcctctcccggggaaggggtgtatttggcctgtgccccaccctagccctccttcgtcttccctctttcaccacgtcttccggggctggcttgagtgtgggagtctttctgccagctccctgcctacagccgcccactcaccagcccttcatgtgtgcctctgagagtcttcttcctaaaccaccccgtgcccttcagtccccttgtgaagcctgggcagtgaacatccttaagcccttagcagcttccctgaatccactcctcgttatccttcaggagtcctcccatatggtcaagcagatgaattccttgtttcttattcatgtcatgccgcttctcacctctggcaaccccaactaacatgcccctccctcttttgtctttcaaggtttcattcaaaccaaacttccttcttgaagccttctgcaaccccatgcctctcagtgaaacgtccttccttactgtgcacatgagccctgtggcacgtgacaactgtgcctggataccccaatttctctttctaaggcagggaattttcttgtacttcctttagtcccagtacctagcagaattctaaaaaacagccattcagtgaatgtgtattgatatcaatgattctggcacagctgacggggccaaataaatgctaagtagtattaagagtgataatggtttttaagtaataacaatacctaccatttattcattgcaatgggttggtcacagtgctagacccgttacaaccatcatatgattgaatacagcgtaaccaacctgtgtcttggcattacttccattttgcaggtaagaagtgacataccttgaccaaggtcatgtggctagtaagtggcaaatgtggaagtgggccagtgttctgcttcttggcccacactcccaacctctcaacatgtgtcctctgccatagctgcatctcccagatcgcatgggattttttcattgttttgtttttgtgaccacgttgcttccttatccctgtgattgggttttgcccatgtctctcctatgagagcagccttggtaagaagcagggagaatggaagggatatcacatgccagaatggtcagaaaaatgaggttgctcagcaggtgtcataagaacggatgattcatgcactgtgccttagagtaaagatggagaaatgcaaagggagtggggagcagagagacgctgacagatgatgagtgagcacaaatgtttatccatgctaatggagtggggacgtgatagtcactctgttctaatgcttatgaggagcagtctgtgggctgcaaatgcaggagcacaaggaatcttcaccctagtggcaggggaacctaaaactccaggctgcaaacagtggctggagcatctctgtaacagtctggccttgcagatccaaaagacaggtcatagacaacaaagacatctgatatttcctgacactgccatcctctgggctctgggggagtccaagatcatttgcagcactgccctgggagtggtgacaggctggaggaaaattactggggtctgaaggagtgcaggcccagctttcctcttgcttctaaggccaacccaaacaaataattggtgctgctttcagaatatcctcacatgggaccaccaccacctccactaggctctctgtccccagccttctgccttaggcttttccacctcacactacactatctaaattctctaccgtagagccaaggagtgaggataagggaaagggaagccaggggttctaagggaaccaaagtagtaccaaattcccccgttggtctgtggtctaacagtacggaaatggatagccatctgcatggggtggaaatgtctcttctttgtaaatgttccactgcctgagatttcaccattctagctttactttgcttccattattccacagtttccaggggaagagaaaactttacctggctaacaccttgatcagaatcacttcatcacagatcatatacatccacagagatgactgaggaaacagagaagagcttagaaagccaactctgtcttcatcaccttttggtcttggtcctcctgccttgggggtataaccctctcttagtttgtgggagaaaaatatccatggtaagaagaaagatgtcaggtccaggacagcaaagaaaccgctcagtaatagaagcaactccgattgcatgagcaggcttctcgagtgctgtcctgtcagcctaccgtccacattcctggtgtcatcaactctctagggacaggagcacagaacacgtgggagccgtcactgcaggagctgtgttagtgacagcagcattcaccagaggcatttaaaggctgattgttttatccatagcattgtctgggctttgagagagaaatcctgcctgcaacaggagaagactgaaaaatagaaaaccattggcagtatcaaagggttgtcattagtggacaagtacactggcttgattcactagtgctgttattatggttgttattttaatttgtcaagagacaatgggttgttggagaacatgggcagtggcccttgcttccaaggaggaaaggcaaagggaagagagatgctagggggtcgtttctgtagaaagcagacgcccaggtgtgtattttccccaccactgctgagccccacagcatggcttgtgaattttacaagtgatactgtgacatcgaaagcattccattgcgtctttgtgagaatctagggtcctcttttatgcttagtctaagtatctacagataaacatgcatctatattatatatgtgtgtgtttctccatactctgtgcatatacttaagtctgtaatgtgcatatacgtgtatctgtctgaacagttggatatatatagatgtgttgcagctctccaacctttaccaaagaaacaaaaaaaaacctaaaaccacacacacacacacgtgtgcacatgcaaataaataaatagagaaggagaaggaagaaaagaaaacagccagaggaggttgctttttctgtttcagaggacctcagcagttcttcccaaaatagacttctgtccttgctgggtaacatctaaaggagacgacatcacagagggtccaggcaagggctgtggagtccgacagtggggttcaaatactcacatgtgctgttgtgcttggtgcggcaactcaacttctcaaagcctcagtttccccatctgaggaagagggacagtccttcctgggaagagcaccctgccctccccatgacaagtgctcagcaatagtctcagccttctttcacaaggaacacaattgctcatcctatagttacagctcaagtttacaacgcaagcatctctcaggtgacagggtctttttttttagacagagtctcgctctgttgccaggctggagtgcagtggcacaatctcggctcaccgcaacctctgcctccaggattcaagcgattcttgtgccttagcctcccaagtagctgggattacaggcacgcaccaccacactcagctaatttttgtatttttagtagagacaggattttaccatgttggccaagatggtctccatctcctgaccttgtgatctgcccgcctcggcctcccagagtgctgggattacaggcatgagccaccgtgcctggccaggtgacagggtcttaacatggaggctttcaggacagatttggtttatgtctgccctggcattcagaaggtgacaagtggagcccggaaggctttcggactaacttctgtaggcccgtgccctctatggccgcagaattggcttcttgttccatgttgctgctagtgctttttgtggccccagccaagtcggttcctatctttggaccacagtggacccatcgaggggctctctggagtcctcccagcccacccttctgtgcctggccactccaatcttgcaggacactgtgctggaaactgacttcaagagtaacactgttgtggctcccacctccggggacttcataggtttgagtatgtgtgtgggaatgtggtctgttttatttactcttgctaatgaggctgaacggagctagtgagggcattaaaacattttagtgttattagttttaaaattagcccgagctgttaaggagagtccctgctcactttgcttatgtgagaaaggggcttctgaatgccaaggttgaatgcccagtgtctttcatcctaaaaaagacaactttatgcgctatgcgttagaatgaacagggaaactttaaatataatgatatggggtgcctgggccccacctcctcctttgcttcactggccctccctggacatcagggggtgtggtttttgcttttttgttttttaagttttccaagtggttctcgtgcagccaaggttgaggcccaccgggctaaactaaaaacgttttccggtgtatgtgggaggcaggtaggagggagggctggcgtgctgcccagctgtgtaccatttcctgcttggtggatgctcagggagtgtttgccagagagctctcatcggatgcttggcatggctagttcagatgctatggacagaggggttcctgtgggaccagtgcttctcagtcctgaaatcatgatcagaatccccccatgatctttgagaaaatacagattcctaggcctcatccacattggccggaacagaacctctgagggtaggaatgaagaatctgttattcctgttattcttaggaatagtgaagcttcccagaagatgcttttgattcagaaaccaccgaaaggggaaaacttgatcctcaattcctaggagtgaagattttacattttccttttggtcatctgatggccctagggttcactagataggccacttactcaccatgtgacccggacaaggcattcagcctctctaagcctcaatgtcatcatttgtaaaatgagagccataatggtttctgcttcctaagagtgtttcgaggattaaatgaggtaatatgcgtgtttggcacattgtagatactcagtgtgttcactgccatcatcatcatcagcactatcattttgtaactcagatagaagctacacactgtaagagcaatttctaagatttaaagagaatgaagtaaaaaattctggctgtgaagtctgaggcaaatctagaggctagtgggggtaaattggttttaaacttgtatctgaaccagaagcttctctggagagagttggagtaagatcacacaggtaatcctcaagacctgtttgttaagagtacaaagccataattgggaaaacagtgaggtcccgattgtcatccagaatgaattaatttacatgcacttatggagtgcctcctgtttgctcagctttgtgcttggtggcatcacatataaaaaggaccaggccgggcacggcgggcggctcatgcctgtaatcccagcactttggaaggctgattgcaggtggatcacttgaatctaggagtttgagaccagcctgggcaacatggtgaaatcctgtctctactaaaaataaaaaaaaaaaattagctgggcgtggtggcatgcacctgttgttctagctacttgggaggctgaggtgggagaatgacctgagcctggaaagtggaggctgcaatgagctgtgatcgcaccactgcactccagcctggtgacagagtgagaccttctctaaaaaaataataataatacatgaaaaggactggattcctttctttcagggaattggccgtctggtctgggaagtacaattagctccctttgaagaacaggagcaggacgagaggatgtgtaattaagtgctaaattgtgtcactaggactctccagggctagatgattcaaggatggcaacacaatgagccatggaggtggctgggggagcctgttgggagagtagggagggatctggagcaggaaactacaagcaaatccaaagagatatccaaggagggtcctgggacaagagtgacggctgagatggggatgacgagcagctgccctacctggatggaaggtgagggtccctgttgtcctggagctgcacagccacttataactggggtcatctgggtctgtggccccctgacagctggtggtagtctgcaggcatacactccgtgtcctgtcgtgagccggtcctcagggcggcatctgcccaggaagccacaggcacacttagcacggcccaagagcactatctgcaggaggcgcttggccccagggctgagctgatggtggttgggtggggtgtaggcgacaggagagcaggtggcctccttcctctgtgccatcgcttagagggtatcggtagaaccctctgtcccagaagtcagctccgtatctgtgggtcttaaaaaccttctgatcctgtaaaatgacatttacaagaatgattagaccttaaattctgtgatcaggcaaggtcttaatttggggccagcagtttagcacagaggcagggcagaatttcgcacagaaggtacctgatccgtgatttgccccggaggtgaaaatgagcaaggttctgttagttaaatgagcataagaaatgcagcagcctcatccgccccccgccaccccaccagagagtcacaaagacgctcattggcattttaaaggctcagagaagtcctgcagaagaagtcctctttagagccctatgtggcctgcaaactgtcttgaccacagtacccttctcacatagtccctgtgaatgttctgggcgacctgtgacccagcctgatctcctttggaaaaaactggagtgatgaggtcctgccagactgagcctgaaggagccttccatctgcctgttcattttccaagccccagactctgaaaggagattcccaagttccccagcctggccctgcagtggtggggagcctcagatcccaggtctggtttaatgttccttagttgttaaccagctggaattaaggctgagaggagactcgtgggcaggctttgcaattgaatgaactatcagtgtggttgcgaggctattttgaagacattttagattgtttctggttcagtaatcttacaaaaagtatgatccaactgatttattaggaaacaatttgtaaactttggttcacttacaagaaagaagtgtttgggtttttgaaaaagatactgcttttgaggctggctgattttcgtgactgactagtgtttatgaactgaaatctggctgcctctgccactcagtgagcctcgcacagtgaattcctagcctgaggcctcattcttgctattaacccattcgccattctctcccactgctgggactttcggatggaggatgcctggcctgtgtgttggcaggagcagaggctgacgtcaggaacataaggtcatgccataattgctgtgccccctgccacccccgccgcctctgcttgctagtgccaggctgcccaagtgctgagaatgccaaggtcactcttccaaaggaggcaggaggcagccgtagcgtcagtcccttgcctcgtccatactgcccatcttcttccaaaggcaccaattattggaagttcctccccttgtggctctggcctctgggacgcctggggacatttccactttgctgggaggggagtgtcctccgggcccctcggatgctccaccagtgagccagggcttgggatgggtagcgtgccaacagggagtggccacttacctttgctcctgtatgtgccctgtccttagaggggtttaaatacatcaatagcttattcgccaaaatgtatccagaactatttttagtgctttgaacatgttgactcttacataacattcattcagtatatataaactattcagtaaatattccctcatgagaagaatggtattttggtctattttgtctctctgccctctgtgttctaatttgggaccagggagcctctcggctccatcctggggttggccgctcccagacctcactcctgctttggctgggcttgctgccttggccatggtgaggggctcttgcggccccgggaggggggcctggtaaatgcagagcctgcatcacagcaacaagtggggagcccaagagcagggtgcagagctcctccttctcccaggacggaggcgggaaaccggccgtgggagcttccctggtcgggaccatgttcccagtccagagggatgtggttgcatgctggagccgctagtatggactcgtgaatgtggcttccggtcacaaaagtgccttccaggtgggaaaatgagtgaggaaacctggattcatttgctgaggtgctgtggcagagcactgcagactgggtggcttgcacaagagaaacaggtttcttctcaggcgggaggctggaggctggagatctgagatcaaggtggtgcagggttgccttctccctggcttctccatgggtcctcacatggtatccctctgtgcgtccgtgttcacacttcccctttctacaaagacgccattcatgttggataggatccgccctcatgccctcattttaacttaacctcttttaataccctacccctaggccagtgcagtggctcacacccgtaaccccagcacttttggaggctgagatgggaggatcacttgagaccaggagttcgcgaccagcccgggtaacacagggagaccctgtctgtacaaaaaaaaacaaacaaaatagtatgctacctctaaataccatcacacattctgaggtgctaggggtgagggctttcgcacatgagctttggtggggacacattcagcccatagctgaatgtccatgcttctgtctaacgggcaaggctgctctgcaaggctgtgcggagtgggcgccgggtggaactccaggggaggcacctcagtctgatgtccaaggaggccccctgtggacgggcctggcccagaaaacctgtgtgtttcccacaggtttggggagatgagttgttctggggtagagacaggtcttgtttgactttgcaccccagttcgtatctgcacatggtgagcgctggcttggcgtctggtgtggagtggtggagagagattgtggaggcacttcttgcagatggcccctgcctctttcctggtgagatgtgggcttttcttaagaaagctgcaacatgtgccccaggagatacttgggctcccttgcccggggtgcacaggacggagcagggaccatttgctgtgtcttctgtcagatctctgagggatgtccctcaggggctgtgaactctggtggaaagtgaaaaagtcccagggtggattccagtgggctgccagccgggcgtgtgtgtgaggcgaggtggagggcttgaggaggtgcacggccccagaagaaagctggagggcggtccagcctaggacacgctttgggcttgcagttcctttccttccttcagggtcaggcttcaccaagcaagccaagggtccctctcacagcagcgacagcagcaacataaatagcactgatatccaacccggcaccgaggcagatcccctaccaccagcttgttctgagagcgtgaaatcacctccatcctgacacgtttgtccccctgtgcttttgctgtgccacctcccgagcagggctggattaactggataaagctggaagagtaagtgccagctccatgacctggccccagggcaggcagcccctgcctcctcctctctgtaaaggcacagagagcgggttgctccaccggccacaaagcacattcccaggaggctctgggcacatccaggcctccttgagggccagccctctgcaccacacaggtagatcccttcctgctaggacagccagttgtttctaaatttaaaaaatgctccttgcatccaaatgcaagagctaaggtgaggtttgctgggcatcaacacctgggcacaaagaacaggtctcaggcagggcaggcagggtgagcagagggtttgggtgagaaaagccgccatgcccgggggctttatgtttttacagagctttcatttctaatgtgacgttaaattcttccctagttgaacacttctcttggtggctggctggcagctgtgtgcgggtgtttgcaggatgataactgcctcagcatccatgccatcctgagctgctgggaggactgctgggcagagactccttggcaggggctctgggaggcatctgaatatccatcttccctgatctcctgtcctgcacacagatgcacacactgcagggctatttctttattcagtttggttttgcttttgccccctagccctccctgtgcccagtacctgggtctaggaacatagaatttaaaagctggggcagattctgagagctcttatttcagtctcatcactttacttgggaggaagctgaggaccagagatgttgagacatgttcttaggacaaagcaaagtttatggtgcagcctcaggtggagcccaggtcccctggctcccagcctggtgctccttcccctggatgacagcatatctgtccttctgttgatttgtcctacctggggtgttttccccatcctcatgtccttcttcagctggacatatttgtggaggtccagacacaactcagtctgggtcatttcttccccacccctcaaaaaacaggttgctcaaggcagatgcagagggtatgcctgtagtcccagctctttgggaggctgaggtgggaggatcacttgagaacaggaattagagaccagcctaggcaacatagtgagaccccattgcttaaaaaatttaaaaattagctggccatggtggtgcatgcctataatcccagctactcagaaggctgaggccagaggatcacttgaacctagaaagtggaggctgcagtgagctgtgattgcaccactgcatgccaccctgggtgacatagcaagactttgtctcttaaaaacaaaacccagattactagtgaggccaaattgtgatataaggtttgtaatagagacacttttttaaggctgaccatgtgccaggccctatttaaatatattactcatattagctcatgtaatcctcatatcgaccttctccactttacagttgaagaaacgaaggcaccaagaggtaaggaacttgccagaagttatgcagctgagggtagtggagccaggatttgagcccaggcagcctcactgcagtccttgagttcctaacctcagatgcctctcctctgaggggagccctgctgtgctgctcatcctgttgagtgacagcctgctaggatgtgaaggggacattggatacttccggaagctgtggtttgactgtgcagatggttgtttctcaggctctggtccatggtgggaagcagtgagtgagcagatcagcccaccttcagcctgtgcgctctgccgtctgacaccttccaccctcagggcctgatcacaggccagcaggcagctgggggccctcttgggtcctctgtcttctcctgagatctctcagagacagcagagaaacgagagaccctggaaatgcctcatagctagtttgaatcctagcacttacacagtcataaagttaagtccttgtggtcttttatcctgtagaatagaaaattaaagggaaaaggtcctaaaaagaattcctcctctgcctgtcccgtcttgcccaaatcctcagaatgtcaatctttccccaaactctgcacactcttcaagcacttcagaaactaatactttggtatatcccaaattgactttcaaagaacgctggataaaattttcttgtaaaaagggtatgttagtcaaaaaaagtttgagacacactggcttaaagtcacgctaaacaagttgatgtgccacaggatttctcaggatctttgatatgcaaatgtccttgggaggcagagctaatccgcagtttggtagaagctgagccccttcccctccatctcacatacaaatgaggaagtgttttcaaggcctgtttgcactgccagtggctgtcatagcaaactagtagcgtccattggctgtcaggaattatgctgttggcacttccccagccccgtgactagccttagaggaaatcaggacccccctcaccaaaaccagagcccactcttagccacctgccatggtctcagctgaagccatgaggcacccctgccagccagttcttcacacctcttcttgggcctgctgttgacttccctcctgtcagctcctgggttgtacccttgggatgtgcaaagctgcaaatctgacctggacgttaggtcattggcccagaggactcagagttgtgttctttggtcctctgggatccagtagggcttcctgcttcactttcatctgctttctctacccagggtctgagaaaagtttctttggcaaaagcatttcattgccaaaaagaaaatctgaaagctgctgatgtagtttaacctcctttatttaacagttgaggcaaattaaggctccaagatgctgagacctgtacaggatcacacagctccttggaagcagctgagccaggactagcacccagctccctgcttcccagtactcatggtctttcggctgcatagctctacttctctgcaaagggtgctggggccgagattcatggcctttaactatggttcttaaatgttactgtgccgcagacccacccagggcactttgtaaaaattacagaatcatccatcttgaagggccagggtcttgggaaagttgcttcatcttttgaggctctagatggagtgttctttctgcgctgctgaacctggagcactgagaagcttttcctgctctcaggtgcatttgaatttgcatggtctgttttacagggcaggaggtgcaaattcctattgcttaagcccacttacataacaaactggccacaccttcaattccaaaaggcaatgcggctgcccactattgcagactatgaaaagtaaggtagaaacaaactctgggagccacagaggctactcttcatggacttatttaaaaggaagacctctggctctttccccagagattatgatttaggaggtctggggtggaagacaagaatctgcattttaaccagcacaccctcttcccacctccacccatgtggttttgatgcagttcatccttggactacacttggagaaatactgacttacatagtaaagaaccaaaactgtgtaattataggaatcactcaaacacccacatgctaggatatgaggctagaaattcaggtttatgattgtccaagtgggttagagaaagaagcaaggcatcttgatttttaatgtggataacatgtagcacaatgatatcatcctgataatctttttaaaattttttttgttattgagatgtatgaatatattatatattttggatattaaccccttatcagatatatggcttgcaaatattttcttacatttaaatctttaatccattttgagttgatttttgtttatggtgtgagataagggttcaacagccagttttctcagcaccatttattgatgagactatcctttctccattgtgtattcttagcacccttgtcaaagattagttaaccatatatgcatgggtttatttctatggtctctattctgtcattggtctatgtgtcttgtttttgtgccagtaccataccattttgattactatagctttgtagtacagtctgaaatcaggaagtgtgatgcctccagcttcgttcttctttctcaagagtgctttggctattcaggcaaataacctgatggaaaaatgggcaaaggacctgaaaagacatttttctaaagaagacatgcaaatgcccaacaggcatattgaaggtactcaaccttactgatcaccagggaaatgcaaatcaaaaccccacacctgtcagaatggctatcaaaaagacaagcaatgacaagtattgatgaggatatgaaaacaagggaatcctgcagggtacactgccagtgggaatgaaaattggtacagccattatggaaaacaacatggaggctcctcaaaaaaatgaaaatagaactaaccataggatccagaaagtccacttctgggtgtatatctaaaggaaatgaaatctgtgtttctaagagatatttgcacccccatgttcattgcagcattattcacaatagccaagatattgaaacaacctgagtgttagctggcagatgaataaagaaaatgtgattttctatatataatggaatattattcagtcttaaaaaagaaggaaatcctgccctttgcaacagtgtggatgaacccagaggacactatgctaagtgaaataaaccagacacagagggataaacactgtgtgatctcaattgtatgtggaatctaaaagagcccaactcatagaagcagagagtagaacatgtgttgccagggctaaaggggcttgggggaagaggtaatgggagatggggaagggttataaacttggcaatctaatgtacagcatggtgactgtaattaaaaatactatgctgtatatttgaaatttgctaagaaagtagatcttaaggcctatgacaccacacacacacacatacacacacacacacacacacacagagggaactgtgttattcagctctattgtggtaatcatttcacagtgtacacataaatcatcatgttgtacaccttaaatatatacaattttttaatttgtcagttatacctcaataaagctgggtaaaactgtaaactatagctatatttaaactacaaaactgtaaaaatataaataaaagtaaataagaagaaagtattaagcatcgccttgcagggggcattgtgagtactgtactgcatatgcctgcagcaatctgcacagatatggcccctgccttctggcgacttacagtccaggagggaagaaatgaggaagtggagcagcgaaacaccaagtagcaaatgctgtggaggagacagctggatcctagtcagccggggaactgcatgagtttccgaggtttcttaaaggtctgtatggtatctctcaccctctagcattttcagcagggagcagtctggtaacaccctagtactacctgtagtcagagacctggtggcctggaagtctataagatctatgtttaaatctttctgtctggtccgcagagctgctcagctcactggttggctacgaagcggaacacttgccatacaaagccctctgcgatgattagctcatttaaccctttaacaaccccatcagataagtagtattattacacacaaggaaactgaggtgctcggagaggctacataactgaacccaagtcagggaccccaactcaggtttgtttgactccagggcctacattctattcccttcagttccctcaacaggaaagatggggcaacatcctgtcctgtcctctgcctcccagttaaaaaaaaaaatatatatatatatatatatgtatgggaataaagacttcttgatgtgtatcaccaacatatctaatttggttttgaatgtgggggaggcaaaatgacattgacagataataggacttacatgaaattctggtttgtttagagatgctataaagagcttggcattgtcgactcatttggaaattcgacttccaaaggagcaaatgcaaagtatttctcaagccccagccctccatttttagatctgaagagggaaacaacaaggtaggtaactgaaagtctggagttgtttctatttagttgttcctaaaggcagggggatggactagaggaaacctgcaagggctttcgactcacagggttctttcattctgtgggcaccagttctctgggcatgagagatgccaaggagctggtgtgttttggagagctcatgctctgaagcacatcagaagaaccaatggttgccgcaagacccccttcctaatgcagatggagttttctgtgaatcccggaaggtgcacttgggtgggagggagttgaggggtagaaaaaggaagacagcccctacgttcagcagaacccagggctgatgtctgcaacagcataaagtgccttctagagtctaatcctggtcatccgtgtagcatctcttcttctctaaaccctcatcctaggctttctttcacgcttatggccacacacagtgaggctttcctctctgcccggaatccacagggcatcacccttcctctggagccagcttggggctttcctgacgtcagtagttttgggggaagccagtgtcacctcatctctgtcttgaagcatatttaactttcccaaatagcaaactctggttctttgagcaaatgacttccagatgctggaagcagcggctagtggaattttattgcccccaaactgtggttctgggctgcatacttctgacatgaaggtaatttggaatgtaaacattgcaagacgtgtgctggaattaattaaagcagccctgtattctctaaggcctgcaagcctgcaattaactgtttacattaacaccaagccaagcagatcaaccagaggatgcagggacccttgattttcactttctccctttaccttcagaaaacagtgaaacgggaaccaagctgacccatttccacagtcccaacctgagaagaggctgcttaagccatcctctctcgcacagcaaacaggcgacagcgtgagaagcctaactgggcatcacggggaaccaagggcaggcaggaacctcttccgcgatatgtcagacgtcagaggcttctttagccagaaatacaagtgtgcccttaaacacgaatggccacattcatggtgggcctgcagagaaaaaccgtggcatctcatacttgcctgataaaactagaaacagcttttgagaataattttgtaacttcatcatggcatttaaaagtagcatgaaagttttggagcaggatggtgatgatgattgcataataacgtgaatatacttaatgccaccgaactgtaaacttaaaaatggttaacatagtaaattttgtgttatgtatattttatcccccaaataaaagagcagggtgttcagactataaaggctctttgggattatgtaaactaggagaacccctggaatagtcctcatttatttcccccacgtaatacaagagggtgaagttctggcttcctgggaacaggcccacacaatgtcaggatatttcagggcatttatgtaaaacaccagaaacccatgcccctggagctgaccaatccttcacacccgctccgagtttgttagaggggtgactcttttggcagggagcactgagaaatgctgatatgtggttgccttcactattggctgtaactatgaaaagagttgctggaggctacctacttaccctctctcccccaaaggagaaagacttcagtatcctgcagcgtggcagtggggcaggcgtgcgggtgtgcacatgcgagctgttctgttgttgagactctagttgttgccggttcctccctctttatatgaagcaaggcaacacccacaacaaagcactgtaatctctccattgaccatccttctgccctcagatcaacacaagggccaattccattccaacagcattatacgactttgaaaatactctttgtgtcccgccagaacctcctcctcttctcttcagtttcttcctcatatgacacagcttccagaccctaaccaccctgggtgtctgctttgggtgtacagtagtttttcaggataatgcccagaactaaacccaatactaatagtggtctgctcagagaggggtatgggaattttatcatctgttctgttttgacttccatatgtccaacattatcccccaatgttgcatttcaaccgtcataccatcctttccttaaaaaagcttgtgatcatctgaagcctcagggattttttttttacatgaatgactgttgagcaagggctccccagtcctgaaattaggtaaatttatttaacttaaactcagaaatttactagaaatcttattcattatgttaaaatcagggcctttgatatccagatactgagtcctgactccctcacccactgtccttccctagctttgggtgtgtctatgtcttcatctgagttagaattctatatagcagaacttgattgaaatgctgtacagaattggcctgggagtacagagaccaccttttcagtttatatcaatcagagtcatgtgggtgtggtaaggccgccctgagtccacccagccaccaccatccagcttgggcttctccactttgctcccaaggattgatggagagtgtgcgaggactggttaaagagatgtatgctgtgatagacagggcaggctagcagggggatgtggtgcctggcatgtggcaggcatccactacattctgcgggctgagatggtcaaggtcatccctagcctccttgcaggtgatcattcagacttaacttcctccccacccaaaaagttgcctcaaaactgctcacaaagtgggggctttgagtttaatttctcctggagccctctggtaggacacgaatcagcaggaaactggcttgcaggtctttggaaagagaagtagcctaagattaagggcctagaaaatcccccagaaaaaaagagcattcctataatcagtgaggataaactaaatgacagtttgggacaacatttggtttccttggttcatttaaaacattgattcagagattggggactggcttttcctgacttaaaagcagtggagccctttccctctaatgtggacacatgctggttccctccctgccttagggaaggagtcggtcaggttggagctaagagggcccgggagggtctttcttggtgaagcagcattagccattggttgagactgaggcagacagggttttagctgaaaaggcttttatcgctttttatctattgacactttttcaattaaggagtctcccctgagatgatctatcgcctccctgtctgagcaggaaataattaccagcaaagcagctccatcacctgccgcatgttttcccatggccagggaggctcaggaaaatatcaacagcctgcctgctgctggcggtgcctatgtgggcacagggcacacggcctttccagatggcccagccctttcctctgtcttatcctcccccccacttcttattccctttgaccaaggtttttatattataccctgtcaccatcagggaatctagccacgtcaccttctctcctgggcacctgctcttctgaggagcttgcagccttctaggctgggtccatgcctcctcttgttccagggccccctatactgctcatatattcagatgcccagggacatgttccagcggaggctacccaggataacatttctatctcactgaggtttttttggagccttcaaaattccatgatctgatattttaaagtaaaagctttaaatataaatgtcattgaggtacagcacacagacggcaaaatgcaaacattgtgagtgcacagcatgaattctcacctcgtgcacacggctgtgtcgccagcacccgggtcaagacacagaacgttactcacacctctcgtgccccaactagtcactgcctcccttccccaggaaccactgccctgactcctaaatggcatagatccatttcccctcttgttgtacttgatataaactcatgaagtctatatttttgtctagatttcttgactcagaatcatgttcatgagattcatccatgcctgtagttttaaagttgttcatgttcatcggtgtatagtattccattgttcatgttcatcagtgtatagtgttccattgtacaagtgtgccacggtgtttctacccattctgtcattgatggatattttctgtctttttttaatggagaacatatgcatgtactttaattacctgtaatgcctaggagtagaattgctgggttgtagggtgtgtgcctatgtttagctcaattattgccagttttacaaagtggttttgcaactgagaagttttttcaatgtagaaaatgtgagaacatttatctcctcagcccctgccgacttgcctttatgaaagaaaacacagaggtggggacttgtgcaaggtgaggactgctatttcttgattcctggcctagttgcctttctattagcctgcaaggaacctctcttttgacggacatgagagaaaaggacacgtcctcctctctcccgggtcacactttcccccaacccattctatagctcatataattttccacaaagtgccttatttgaacttcaaatcttcaaggccagatgagcaccacagacgtggccttttcttgtttatccagagggtttggggaagcacagctccctgacattcattgatggatatcatctgcaaccgtctgctttccttttgtgccaacaatctgggcacgagagagagatgagtgtttgcttgagattgaatttatgacaacacggaaccagcctccatcagctagactgatgaatgcctgggtgaacatgccacagtttgtgttttttccccttctagtcgccacctttcttgattaggaagctgtgttgtcagtgtgctgacttattagggagaagaatgggctctagcaggcctttaaccatcacagttctcattcaggaaagaaacgaaggcaggtgttgtacgccccgtgcctcccacagagtcccgcaagctgtgagtgtcctcaaaccatccatccatcctcccttgaagggcttgggggaaggggtgtaaaagggaagaaaaaaccctattaattgtacgcacattaagttctaggcactattttaggtgcgtgtgtacaatttccggagcaaatgagtgaatgaatgattagttttaaaatacaattaagagttttgctggcttccccagaacagaaattttctgagacttttcctagatcacttttagcagtaagagtgccctaagaataatggctttttggtcaaagtctcttaatgtcactgaagcttgggaacatgttctcatcgggcaagagaacaacaacagaaaggaactgcattccagttccttgtgtataaaggtgctcctgacctctttggccccaactctaagggtaagaataaccataagttattgccagagggcagcaccttcatggacagagagcaggtgtttgagggtcccatgctccacccaggaagctgctggctccactaagagaatgggctttgggcctgttcagtttctaccaatgtggggcaggcccccaaagctgaacatagatggagacacagaagggcagaacagttaaaaatttaattccacctttgccatctcttatctgtatggtcttgagaaagtgcctgtgtttctgtgagaccttggtttccacatctgtaaaatggggagaatcatacctcccttattgggttgttatgaggattaaatcagtcagtgtatgtaatgtgcagggcatgtggtaaacgttcaagagtgtaggctttttgttattggagaaaacatttgtcaggtatctactgtatgcagacagaggccagacatgccttcaggtacctgcttcatgcacagctgaagctgacacatagtgctcagttagttacttgagactttgctttagctgacaaggaaagcccttggtcatcctgtataccgtgccaggcttggtctcatgaataggtggaatagcatgtatatggtcactgagtttcagtggagaccccaatggccaaaaagagaaatcccacctttcttgttgatgcccaaacaccatgaactcattagttcaccaacagaaaactcccaagtatctgctgaagttagggcttgtgctggcagcctgcgtgactgtgcgggtgtgtcctatgaagagctgatttgcagtggagacccatgtgcacaggcacaaaaagatggccagggacctcggggagaatgcggacactaccggctgactgctggtgagacttggactgaatgagaatactcatgccaagcacccagcatagtgcctgaaacataaaaggaaattatctcagacctactaggattttcttattaaacaaaacaaaacagaaagcagaaaacaagtggtggcatggatgtggacagattggaaccgttgggcattgctagtgggaatataaaattgtatcatttagaaaaatggtgtggtgtttccttaaaaaattacaaatataattctcataccatctaacaattccacttttgggtatgcaccctaaagaattgaaagcagggcctcaaagagatattcgcacacccatgttcgtggtagcatcactcacaaaagccaaaacgtgagagaaacccaagtgtccttggacagatgaatggataagcaaaatgtgaaatgtgattgcaagctttaaaaaggaatgaaattctgatccatgctgcaacatggatgaacctcgaggacatgacgcgaagagaaattagccagtcacaaaagacaaattctgcatgactctatttgtatgaagtgcctagagtaatggaatttatagagatgggaagcaggatgacggttttcaggggctgaagggagtggggaatggggagctattgaaggagtacagagtttcagttttgcaagatgaaaagccttctggagatcagttgcagagcaatttgagtgtatataacactcctgaaccacatacttatacatggttaagatggcaaattttaatgtattttcccacaatttttaaaaataattaaaaatttaaaaacacaaaaggaactcaaatgaatacttgctgtatctgaatccagatgaacagaagaaatccctccaagcactgtggccctgcgcaggccagaggctctggtggcgattggatgtgggaacacagtctgggtggagaggagatttcaggagagaagaggaaacggcgccatctccttcatttcataatcacactgaaagcagccctgggagaggtgaggatgcagtggcttgatctcatcctaaggaataaataactggcatcacattttaattagtggagaagctccgggagccaggcctgaggaagtgcgccttctgccggtgctcagaggcagacggggagagcagggggcgagccgagggtccaggacatttgaagggtggtgggtaggagtggtgctgcggatggcttggtctgaccggcccagggtttggaatagacagagtttttctcactcagttgacctagttgaccttcccctctgagaaaaattcgtgaggcatttaaagaatgatctttgcgccccttggcctgggcgctctccttctggggcgggaactcacaggatgagggagattttgttggagctgtggagtgtaattacaggcctgacaggtggcaagtcagagggaacatcttactctgcagccgctgaaacaatgattttaagcaaggcgacagcggagaattctccctattgtgcagggcaaccctgttgagccataagccagcaccacatccccagtaaaatcaatcccagtggtggaaggaggcctccatccgttggacctggcacccagcccacattgctcaagagctgtctctgggcctggtatatgctacgccctgtgctacgcttctgtaagcatatggctcctgccctcaaggggcgcagagtctagagaaggctctgctaagggtcccagaaatcagaggagtcaggctgagtgctgattcccagcttggaggagtttacagatcaccagacaggcaggcgccacacggcacctagaatagtgttgggcacggactaggtaccaaagaaagagaatggagggagagagggaaggagggagatggcatggggatggaggatgggaaatagggcagggagacagaaggtgggggacagggagtgcggggctagaggagcgggcagagagacagggaaggagggagggaggtggatggggagggttggatagaagagaatggagagagagaaggagagggaggagagcagggaaggaaggaaggcaggcagggagggaggcctactcctctaaatcctcaggaaaaggactgggaagctcagagttgagctccttttctgacaatagtggtgtttccaaggaccaatctttactctccagagtggggcttgtgagtctctcaccccagctgtttcctggggctgtgaagttcatcggctccttttcctaccccatcacctacctgtcacctgtcctgggcaggcaggggtccccacatatcactgcaccctcgtgggctcccctgccctgtcctggcagtgtacatgatgagcagcttacatgatgtgtagtgtacatgggggcggcgtgcatggtgggtggcctgtgggggcagcgtgcatgaaggcggcatgcatgggggtgccgtgcatggtgggcaacatacatgggggcagtgtgcttggtaggcagcgtacctgatgggtggcgtacatgggcagcgtacatgatggccagtgtacacgatgagcagccaccatgcatcaggaggaagagacctcgctcccacgccacagccccaggccccaggcccctgacaccctggctccgaacccccagcagccagcgggtgggttggattccagggtctccactcaggggcattgccgggtgagcctgagataagggtgtagctctgctcatttctggaggtctccacacaccctccgggcagacctcatcttcttcagacatttcttttactctttggcttgctcttgctgtgtattaaatttgatctggggtgtctgcaaatgttggtgctcacgggggtgtgctgggccgggagaggatgagcattcctcaagaagggagacagcagagcactagatgggaaggggctggaccctgaaagagcctgccaggtatccccttctagcaggaggggcccccagacatttcacttcattccttaggtgtgagtcatgttcacatttcagggaaaatgcacatccttcccagagctgaggaagccccatgagctattctggtcctgacaccggctcccaccctttaaagctcctgtccctgggggttttgctgcaggatggtctctgaagtctgcagccaagtatttcccttcccttcttagagggccacgtccctggcctcttctccagccccggggattcaggccattgggtgtgtcccctgcctgaggataagccacagtgttactgacctgggcccctgactccaaattgagcattagattgggtttccagtggttggtcagtgccatgaaaatcttggacttcaggtcctgtgggatccagctaccctcatcctaactccctcctttgactttattccaggctgacagagcagcctgcagttccaccctctatagctgcctcttggccttgcttttgtttaattcccatgtatttgttgaatatgtatgcatattttagcaaaaataaaaagtaagcagaacccaaataccaacacgtcctagtccatcaggtggcagtgtatgtgctctcagtctgagaaatatacacaagtcattaaatagcaattattgtaattagcagaatgtacacgtgattaatcaccctctgcccccgctcctccatttaccttgcctgtggcattagtggataccgtaaggggctgggagccagcttgtggtatagaggaaggagaaggggagggctggtttctctggggtttcttttctctctgggggtggatggttctttctgtgttactctggaccccctccaaggccacctcttctctcctccctttctctgtgacccatcccaaaacacggcttccctcaagaaaagctctctattaaatcagcagcttggaggtgtgcagtctcagccaggcattcaggccaaggcagctaggggtaggagcaggagacaaaaaggatgaggttcctgggtgcttggaaaccctcattccctgcacctatggctcggggatagtcacaggtcctgggtgacctgccagacaagctagaccatctacaaccctggggggcccagaggaggggcttccatcaccacacggatgctgcagcagcagctgtgtaaggcaatggatggctgaggctgcagcctataatcacgtatttacagttgctgcattatggaaaattaaaggtgtgtgaggcacagcctcttcagccaacagaggctgtctgcttgggctcagctcaggcagccagtgtcacctgcagctggaactgcttcaaatcctcctacctgtccaggggaggggctttttctggcttccaaggtggtcgttgggggggtgggggaagagcaggtgcctgtactcaccttggctcctcctttgttcctgggtgggatggatttgttctgttttctgtccacctgttagggcaacatagcttttggagtcccattttgagcaaggtgcattagcctggctcagttccttatctgtaaaatgggcacttgtacccatctcgtagggctgatgggatgattgaatgcaatactgcttagccttgtgtttacattaattagtttattaattctggtggtttgataaatattgagcacctacagtgtgtcaggatgaatgactctaggctctggggataaagcagtggctgagatacagcttgcatttagtggcatgtgtgagcatgtgtgtggggagaacaaacaactaagcaggtaaacaagtgaataaacaaggtaatttcatatagcactaggtgccatgaagaaggtaaagtcatatgggctgggaggtgcgggctctgagaaggtgacatttgagccgagacttgaatgaggatgaagtcctagccatgtgaagatctggaggagaagttgccaggcagagggaacagctcgtgcaaagtccttggggcaggaatgaatgaagtctgtgattatgttgtgatggcaactggttccttcctcgaaggtaaagtctggatcaagtttgcattaaatcccaaggtgacctggtggtatacatcagagaatcttccacctgggagtgaagggctgagttcttgggaggtgtcccagattagcctgatctatcagaactagacgcagctgctgaggctcattattgtgttcaatagccaaaactaatttatttatagggcattattaagaaatcgatttaatttgcactttgggtcaattgagttgcttcacacttgtgtgtgcacattgtttatctttacaagttattttccgtgcacatgtgcctgtgtgggtgatgaacaaggagaagtgcttgagagcccgggaaaggcacatctgcctacaaggtgaatcgggctgaatcacaggggcactggagccacccccagatgaagacatctattttcaatgaatgtagtaaagcttttcctaacttcagaagccagcaggtggactaagggctgggagggcccgagggcctgcccagcacattgactctggagactacgcattgtatattcctgccaccgtgggagactcccaatggccaccagtggtcatgatgcccgggcatgtgtggcgctgtacagtcatgaatcacttccatctgcacgatctgcaggctcagaacagccctatgagaaggcaagagagaaatcatcttctccattttacagatgaaaaatgaggctctgaaaccttagtggactgtccaggctagaaacgggaccctcccaaagtcaggtgttcctcccccttgcctccctctctcccttccttctgctcaccccaaatgctttgttgagccccttcttaccatgccgcgttgcacggcagttatgctgtggcattgccacctgccagcttgcctgggctcgaatttcagctctatcccatagcctgttgcatgagcatctgtctcacgaggttaccttggaagttaagtgggtgaatacatggcaggtacttagagcagcgcttggtccatagcaagcactccacaaacgtgagtggttgggtgatgaagtggccctccgcctgcctgctgcaccacgctgtcccgacgctgtctgttctgaaggtcctcaccactccccatagctgtggtccagccctggtctctgaagttcttctttcttgtcctctccatttacctgcctgttctctgtgacgatcctcaagccctatgctctttccccatcttctccctccccgccttcctccttccttccctgtttctcctctcttctttgcacacacgggagacagccagacacggctgtagctctttttcagccgaccttgcttcctctatctcaatctggtaattcacaaccctaaggaaatttgaagttctgaagatgttctttaagctcacaatccagaaaataataattttttaaaaagtatttcagcagccttcactggccacaatgttgaggggctctgctccccctggagaggtctctctagcctagatatgctggggttcactgcctgcagctgcaccttggcaaagaccaagggaggaagttgggcctgtttgtggaataggaaaatagtggcagaatctgagaggacggtgagtgtcgccatcagaataggattagagtagacccacataggaggcgggatcttcagctggccccaccacacctacccctcaccaccctgtcctcccctgcagtgcccacacactgagcttgctgccctggacctgtcccctgcgaccctcaaaaaaccagacctgaggcagcttccatccctgcccagtgacagctcatcccacagtttatcttctgcgagctcatgcttcctgttcctgggttgtagcccagcacatgaccaggagatttggggaaatggtgcattaacttcagggtgggtctaatggaggctgcgtagggcattgtgggagtccgtgcagggaggagcttttggtgggggagggggttggggcagggacctctgtctctgtctggaatcagaacctccccctggttcccagcagagcctagacggatgggggcgtacagtggggtagtggtggtgagtgaagggcatggagaagatgaaatctgagtccttccattccagttctccatcgcaggagccgggtctgtttatctggtgagtctggctcatgtagtcagtctggacatttccatttgagaacaagccagttggctctatatataacccaaatgtccagagaattgtcaatccttcccttcaagtctaaaaataggagagcaagtcccagttctgatgcttaaagatgactcactctagccactctagcctcagtttccctcaaaagcccgggggatggggctgacacctcagggcttccatgggcctggcacaaaacgtgaaaccacctcacagggccacagacacttagaggggcctgacaagtgttcatttctcgattcattttgctttggggagattttggattttttgtcatctcatttctctggaccaagaagggacaagccgcgcccttgctgcccgaatctccacctggtggcacctgagtttgtgcccagatgacacgctggagttgtcctgtttttgtccaagaccattgcacacatgcctgaggaacacacagcagccctgggtcccgcgcttgcactcggagctgcccgggccccgcctccccaggagaaaaggctccctgagctgcacctgctggagcaggcatgctgccaggaccctgatgtttcagctgcttctctgctctgtgattctgtctgaagtaggaaatagggcaggcttgctggtagactccagaggtcattaaaaatatgcaaaggaaataaacaggcctccatcaatcacttccttggcgggcttgcttggaagggtggctggggaagggcatgctgggtctggggcacagagctgggcctctcggggggtttgctgtctgtcttgctctccatgtgatgaactctgtcaggaaaatgccatggagtacctactacgtgccagggactgcgctggatagctttctgtaagctatttagtcgttactgttgcctggcgaggagtgaattactgtccatttccacagatgagaacactgaggctcagagaggttaaatgactgacaaaagaggttaaatcacacaggtttagacccagctctggtttcaaagctctgcctggacctgggctctctttcccaaggtctgtgccagccgagagccctctgcagtcctgtaaagcggatgagtgtgccgccctaccctggctcccatctcctatgctctgtgtgtcacctgctgtccggaggcacccaccctcactacagcccctcctgggcaacctctgcccaccatccatactatctggtctcgagacccatttcctctgagctgctctcacattggaaaattatccaagaaactctctgatacagtgagaatacctggtcgggaaatagtagattagtttactaggggagcaccttgttttcacagaggcaacgtgttttaacagaggactcctggaaccaatcctaagaagtaaatgtctaatagttgaaatttgttctttttgggtacatggtatatggtttattggaaggaatatcggctgtagagttacatatcaaatcccaaccctcacttactcgttgtgtgaacttggacaaattatgcaaactctctgagctcccactgtaccatttgtaatacggggataagtgaagttacgcacacaaagtgcacagcacagagcctggcattcagcaggaccatcaataaatatgagtttccttcctttccctttgagggcaaacaggttttgctgctttccttcaagtcatgtaatagccaccaacttcacttatgcatcagcccagccctggccatgtagacaaggtggtggtgttctgtacctttcgtgaagggacactcaggccacgagctctgcggacagcaggaagttttccctaggccagggaggaagagggggactgaaataggacttccttcagacatcgccaccagccgctactgtgtgtgcgagctcaactggcttttcccaaggggcccttcattccactcacggcaaacatcagcctggccagccccctgaggacggctgtgaggaagggcacacaagggcctgcagaaactctgggggcagcagggggaggcaggactcacccacatttcagggggagcgtttttgttcttcatcatcaatttttttcagaagggcttttgaggggtggactaaaggaggcagggagagaaaaaggaggatgacgagggaggagagagagagcagagaaatggtgcataaagggggcagatagttaggaggataaaggtggacggtataagctgcccttcattcagagggaacgcgctgatctcatgttcattaaccatcagctgggaatcttgttaaaactgcacattttgaaaacttaatgcaaatctttgaactttgattcaataagtctaaactagggccctaggaatatgcattttaaccagctcttctagcaatttggatgtagatatttggagaccacactttgagaagtacagaaccttcagctgggccctggaatggagattctcgaaagtcccaggctcctttccctggtaaaagcagattctttatctcattagaggggctgccactgcccttggactacaggagctattttccaggaatgtaatcaggcttgacccctgcctcctagctctcgccatgctgtgtctcctagtaaatacctgcctgcaactcttggcattgtttttggccttgagggcccagcctgtatttcaccctgttctcaaggcctggctgcattgatcagcccactggatttactgcctgaaacaaagcttagcgtgatacttgatcgatctctcctcatttcatgtcactcagaatggctcctgctggaaggtacctgagagacgatctggttcaattgtccttaaccagggtaggcatcaacaactgcttgtgaagctttgtaaaaataggcagggccaaactccaggaggctcctgatttggtgaacattctctctatagtgccatggcagatatatcagttaccctctagtattcattcttgcctccttcttcctctgctgggaatgtggatgtgatggctgcagctttagttgccatcttggaccatgagtaggagatgatcagctagtgagctggaagcatctggtgtccacagactgagtggagtagactgttcacctcggagttttacataagagagaagaaatgaacttctatgttgtttaattaacaaaaaaaaaggaagcccagacctgctccttgagattgaggtcctggatgctgaattcctgttcttctcaattttccgctagctttgtaagttatttgcaggtaactgctgtacgtatacttcctttgcagatcttacgaaatgaaacacactgccaggcatctacagtcaaacaacaaacacttagctgactgagcaagtggttgattaggttgcctatcctcccctttctactcaaagaaaatggggttcattggtagcgtcaggaattctgggctttcttcctgattctgattctgatttcgttctgtgccttggcattcactgtggtccacggtagaatgacagtctttaaccagacgacctccacactccatccatttctaacattctgacctaacggtagttctgagaggtgttcgtgtggtgtgagcaggaactcggaatacgtgaacctgattggctaagcttaccttgtggttggttgacaaatgactaggaaatggatggagttgagggttgatgcaacagcgtaattacaaggaagatggtgaacttggaaggttgccttgccaaaagcaaaacgaaaattcagttacctcattataggtactcatgaaggaagatggtgtcagaggaaaaatcggcatgactggacctgctgaggtgaaatcactgggaggtgaggttgtacctgaaaactggacctcagtggaaaaccctcagatggttcctcaccttacttcctccttcacctatggcctgttctcctgaatatccagttcaaaagatgagatcatttaattactctgtaggagaacatatcttccagatgccctagataggggggcagttctttgcagaggaagattttgatagaacttcagccaaaagagtagtttcattagatctgtcaaagcggcaaggctgctggctccttttctccccgtgcactgagagtagagagggtgctggctgtaatatctcttgccccccaaatgatccttgagctttcaaggttcacagaaatttcctggatgccccagttctttcttcttagtacctgggtagcagaacctccctggggatactcagctccctttattagagagcttctgcccagtgaggctttgtgcccaggtttaacataagttcctggggtgctgtgatagcagtgaagtcactaggattctagcatttttgcccccttcttttattttaatttgtccaaaggtgtgacttagtactgaccccagaatgggtgttagaatgagctgaagcgatgggtggattagtcaagtttagctccaaatgcagccctgattgtctgcttttgttcattctccctaggaaaggcattaagaaccccaaaagtgaacattagtgaattatcactcttcagaccaactggagcagcttcagtatggaaaacataggtgggcatgggcttgatagatgagttttatggaagctgagaactgaatcaatgaatgccacttggtctgttcttgggccatttattcgccatcttggtgcaattagacaaggatgtctagatgggggcttttactgtgtcagcttcaattagcaagtcatttttagttgttgctaatgcatcttctttattgtgccattgatcaattgcaacattcactttgacagtgtgggtagacaaggccactcaaggcagcctccacagaatgactaaggagcaatgcggtgtctcatctgggaccaagtggaatttgtctgtgtaataatcaggtgaaattgagtactgcttgttgtcacccttgttctatttttacctctcggattgattttttcaggatcaatgacagtatgggcattaacaaaatttgctgtggatgcctcctggttttgtgatagataactaaagatagcaccctgaatagcaatgttggtatacaatggcttcctggtcctgttggccacctactgagtctacaaacaccgcagatcgatgctgctggtctaatgactgcatttcagtctccacccattttctctaccagtatcatgttcttttcctgtatgtaactttggaatggttttgattagtggaataacagcatcaacagtttctaccgttattacaatttttcaaacacatggaactctgtaatgcattagccagaattaggtgctctgtcttgacattacctagctgtttgccctactcaagcccaagtgtggaaacttgctcatgaggaagagtcccttcacctgcagtgtcagtgcaccaccagccaatgcagtgagggccgatgcctgtccccatcaatgaacatcattcctttgtgcctcttgtcaagcaagtgcatcctattctgcacatgccacatgctctatcccgacttgtcactttaggctcttccagtctaccccccaaaaataataataattcttgattttagcattttggcaaaaggaaccgtttttgctgctatagatgttgtgtggttgtgtgattatggggacatggtgaagagtccagtgtgcactttatgaagttcacattagaggagaataaagtaggaaaaggggaatgacctaagacaaaaaacaagtggcagctgggcggctgtgacttcactctcatagtccttgtagtgaataaactcccctaggaaagggccgtgctgcagaatggcagccacttcttgtgaaggccatgacagctggattttgctccaggaggattagaggtctgttgctggaacagttgagccccagatggaataacgttagttggtttacatttaggggccgtgttgtttgaaaatacatatctttaaacactggaaacccactcagtgtggtgaagaaggccacaggaactaagaaagacaagctgaacagctgtcggggtctccccactcacatggggtggacatatgctgagagaagggtggatggtaccacacatcctgtttgaattgcatcctcccgccctctcaccttccctccctctccttatctcatagaggaatttgcctacgtaggtcaatgccatggggcttgacctgagcatgagatgccggggaagacctgcgttctcgtaggaaatgtatcggtgtgggaggcctggggtacgtgagcttggaggatcacctcatattgctaagcctcattttcccatctgagaaataaacaagttaacattaaaaacaagataatttgaaaaagaataataactaagatttattgagttcctccatgtgctaagcactattttaagcatttaagtgttttgactcctttaatactcatgatatcctgcaaggtaggtgcactgattagccccattttacaggtgggaaagctggcgacttgatttgaatccaggcagcctggcttcagtccagaggccaagtgcttagccaggatgctatttttccaatgtcctaaattatgtgggactaggagagaaaaacagttttaccctgcaacctttataaagcccacttggccagatggagatacaaaaagcaatttctaaaaacaacaatgataaatcagtgatgaagggaaggattatataataaatggtgctaggacaattggttagctgcttggaaaaaatatcaaagcgatttggatcctcatctcatacagtttgccacaatatattccaagttgattaaatagattaatggaaaaagaagaagaaaatagagtatcaaatgtctgactgggggaggactttaatagctcaaaacagtgaaagaaattacaaaaattggggatagttacaactttaaaaaactggaagtctctgcatcaggaataaaagagcaaacaataaatttgggaaagtacttaccacgaatgtagtatttttccttaatatccatatttaaatatgtatctaaagaaatgcgaagactctgatagacaggtgtgcaaaggagccgtatgataccctaataacatttggaagtgttcaacctcagcaataatttaaaaaattctaatttaaaaagaaataccatgttaatatgattatatttattcatctatatcatatgtacatgtatggatgtatatataatatggattatgtacatacacacatatgtacatatcccaactcgagagctgctgaaaggacttagaaataatgacacccctagagcaatatgtgagtctagcatctagattttggtttctaatattgtgctttactgaaaggaatcaaaggcaaagtcagcacaagagagcttcttgctacatctggtgccagaaagtcatgctctcagaaggacgaggtcgtgtcaaaggacacagaagtcccatccaagagcttcctactgcctaaatcccggataattagagcatcaaaagagaggagacattaacagcttaaataagaatccatgagtctataccgacatacggaagttagtgaataaacggggcagaatgaggaaaacttttccttaggacataatgccaactaacaaatgtggacacgccacccaatgtgatatcccaagatggacccaacatcacttccgtggtgctcctgcccaaaatgcgtgattctgagctaatcaggaggaaatattagacaaacccaaattgagggacatgctacaaatatcctggcttgttctttttaaaaaggtcatggtcatggaagacagagggatggagagaactgttttagattaaaggaactaaagattaaaggaactaaagaaatatgacaattaagtgtaatgcatgacttaggttgaatcctgaactcccttttattaaattttttttggtataaagggcatggggtgaaatttaaggcctacagattagttacagtactgtgtccatgttaaatttcttattttgctcatcacagtatatgaaaatgtctttgtttctataaaatacatgctgaagtatttaggcataaaggacatcctgtttggaacttagtctcagatgattccaaaaaaatatatgtgtgtttatgtatgtgtatgtatgttacatatgtatatttctgcctacatacctatctattgaggaataataaagcaaatatgacaaaaatgttagcaattggaccatctaggggaagcatctatgtgagtgtctttctctgttcttgcaacttttctctaagtttgaaattatttcaaaataaaaagataaaaagaaaaaggcaagtgccctattttgcttgttgatgaataaggacaagccattgaaggagaggatgtgagtgtgtagcaggaactcctaaaccctagccacaggaaagacttggccagacttttctggaatgtaacttggcaatttgtattaagaatcttaaaaatatccataacttttagccccatttctgctcaaataaaataaacaaaaatgcaaagacgtatgcacaagtatcttatgacagtgtgacttccaacagtaaaatattggagacaatttaaatatttaacaatgggggcctggtgtagccctaccatggaataggatgtgcccatttaatgatgtctctgaagagtttttaacagcatgacagcatgcttaccttatcatgtcctgtgaaataccagaataaaatgtacatgcagtagaatctcaattacatccaaaatacgcattataaatctggaagaaagtaagccaaaatgtggagtatacttggtagcatttctccctactttttaatatttttttagtaatatcacattttttatcataaggaagtatcctaaaggcagaaaacaacaaataaagtagcaatgaagttctgagtctttctgtgactgtgtgacgacagtgtctgaacagttatccctccggcagtgacgagcagccccttggacatgttccagtcccagttcttcagacttcagaaagtggggaagactccgtgggggaagaggaggggttgctgatgtcatggtgacaacgtggagtgtggcacacctacaggtcttgatgggctgtgtgctgggcactccggaatctcatttaatccccctagtggataaggaacactaagtattggagagacagaatgatttacccaaggccagtgtgtagtaagaggtgcggctggaattccaggtgagattgggagactccaaaacctgtgctcttaattccagccctgcctggcctcctggatcatgcccatggtgggtgaactgggggcgctggcccccacgctgccatcctgacttgtcagcctgtttgcttcctcctctctgttgtgatttcctcaagcttgttattaaataacaagcatccttcctgcgttttctcctggaattctcatcccacagtggcctaaggggaaggcaaactgtatgcctgtgcataggaagcatgaccgcgccatccagcctccttccagtagcagtggatgcagccttgttagggtgattctgaccccttgttctccgtcacctcacaaggcgtaacgacaggggacagctgcagagagagatggaggttggcattcagaagcctttctgacagcaagagtgaatcaacacaaaatgaatcacacaaagacaccattcactgtctccccagagagcctggagaagaaatgcctgccatttgtgtagctctttttgatgttcaaagctctgtggcacacagccctccttagggtctcacaagaactccctaagaaagacaagacaggaattacttcccttaggaaaggaaactgaggctcagggaaatcaagttacttgcctcccgtcattggtgactaggtcagtcttctaacttcctctttatcccttcttactccttctgcaaacagtacgatgctgggcagagtggaagatcccttattgtctcaccctggggcaaggagatgggctagatcattcctaatgctgcttcctgcctcagaagatgaatttgcctacaagaggtgggccctccatgcttataaatccttctccttcaggttacccccacctagtgaaaaagatttacacaaggcagaaagtgggtggaagccatttggccactcatgatgtcttattctagaggaggccccctgaagtgaaggtgccacagcattactgcagttcagcagacatttaccagcatatgccagtcactctactggaactgaggagagagaaagccagggaaaaggttgccatgggttgagtcaaaagaactcattctaggctcaaaaggacaggagcgctggttcattaggatgctcaacttccaactagcagactgggcacatgtcctagagaggaattgtgctgtagtgaggcgaagtgggcttggatgtctggcaagtcatggttcagatactgactccagccaggcacggtggttcacgcccatagtcccagtgactcaggatgccaagacagtaggatttcttgaggccaggactttgagaccggcctggactacatagtgaggccccgtttctacaaaataatatttttttcaatgttgactttatttcttagctgtgtgacttccagcaaattctttaacttcattgaaactcagttttttcagctataaaattaagagaataaataaactgtcccattgtatgatgcaaggattaaatgagatgacagcaactaaaggcctgccaccatcaactcttggcaatttatttccctcctaaattagatagaaatgtcatggtttggggtttccattgtgtgttcaagaaagataagaccgtaacgcctttcttaaatgtctaagcttcattatcagagcttcttgcacgttctctttaagcttttcccccatagacctatccaatggccccaggctgaggcacccattccagggactcccacgcctgcttccaagctagcagtggcctctcatgagcctcaaccctattctgagatgctctgggtttggaggttctagtatctcagccacacatagtgccattttaccttgtcccagctggccaaagtgtgactgtgatcccctgtcttccccctcactcacccggcagcctcatcttggctgctggcgattttaggctgggttccacaagtggccccagtgatttatgatccataactcagtggtctcttccgccatgcctgcaggctcccaccttccggaagtcactggaatttaaaacaccatgaaaacaaacatctgtgatttacgatgtcaagagccatttccttcctcttgagacaatctccagggtgattttctttaggtcatctgctctgtagagcatattagttaaaaaaaaaaaaccttaaacataatgtagaaagatgtgcaggtatggaagacagaatggcagcacctttccacgggtggcagccatcagacagagcaggacatgcacagcgtggctccctcctgtccctggaaggcaggtctgctctgttctcttctttcacatgtgtctactcccagcctttccaggtgcaggacagggcaagcatcagaaacactgggtgagggaccggccctccctttgagtgcttcctccctgcacatctgagtcccatctgtagacccagagtgaggacatctgcccaacctccctgcaggctgttgtgaggtcagcagaggcccagaagccatggtaacttctataggagagacgcaggatgaagaaagttgttgtgacttttgcccagaattgtcaagaatacttcaagtggtatagatgtttttcccaaaaaaaagtaaggctgaaaaaaatcaaggctgatcctaaggctgttcaagtacaaacagtttgcaagtaatggaaaaagctataaaattttaatatagggagacctcaaagccttgaaaggaaatataaaacaactccaaaaaaaaaaaaaaaaaacaaaccctaagcatcctctttgttcctcagtgaaaatttccttactattttaagccacattgattcccaagagagaaactggcaaagcatggatggagaagcttcatttccctaccactgctgtgaaaataccctatgctaatttaaggatatagaattttctaataaaaacaaccagagtgcactaggcacgattattccaacctatctttctattgtattggtccatctactttgccgatttccaaaggaattagagacggctttattacatttaagataatatgaaagaagacaagtatagcccctctttgatttttatgttacacattgggcagtaggtttttaaagagccgtgtttgactctgtcctattttggggcccaggtacatgattcctatttttagcaactctctggtattgtgaatctgagatttcaaccaccagtgagtcagaaggtctggctgcccagagatatgtgactcagacaggcaggaatagtctgttcaccatgagatgagggcttaaaggggagcttttgtgcttagtgaaacacgcaaatgaaaacaaccgtttaaataggaacctattgcccttccggaaggctctttgcctgtccccgaaaattctcagctcacacccagggaagagctggtgctgctagctgggaaatgaggccaaccccctggctacttcctcctctttaggggccctctaaggcatctgggcggaggtttctgggtggcttcagccttcagaattaacacaacagcctcctgatgggcagcagtggtgggagaaaggagcgagtggagtgccatgtcgggcagggttgggacacaggatgagatactactcttttaagagtaagacaccgcaagaaaaggtggcttcccctggaaaggtgggaagcaacagattggtgttttcttgattagaaatgctatggaattcattcatccattcaccatccatccatccatccaaacaaccaatgcatatgggaagctggctacgtcctcggtcctttgctaggtactaggggactggtttccatcctcgagaagcccacaggcttgtgggaggaagataagcaggtagagaggcagcctggctgcaatgcccttccaagaccaaggttttgggattccaagtttctgaggtgttctgcatggtcagtagtccctgagaggcccttcccctgtagaactgagtgagcattcagggtaaacctggctaaacacagactagccaggaccattgtttctggccgtatgaacaccctccttttcctttcctccagacttagactccttttggagccaagcaccccaagactgtaggccttctctgggcgtgagcctgagggtcacagtgctcaccagccctccagcctcgccacagtgaagatgcttatcatggaggctgggatagttgtgtttttcgctggtgtttagatgttccagtgttccatgaaagctcctgaatctcttccctaaataacaaagtcctgtttggtatttggtgaaatgtttggagtgccgtgttcaaccaagctgaactaagctgctgacaaaatactgtctcagccctttaataataatagctaacatttgtatagcactctacagtttaacaaagcactttaaatgcacccagcccctttgagatgcgagggcagagttatcatgtgcgtttcactcaggaaaagtgggctgcccagaggaactgagtaacaccctccaggacccaccactggggaggccagaagctggccctcctgaaccaggcactttgcccttggccaccttctctgaagcctgtggtgaccacgcctcctcctctgacttcaggtttggtctttgcctctggtctcagccccctgtagtatcccacaggcagcccccaggcagatctccttaattgtcccctttctctgcttcagcacctggaatgactgtcccaggattaagtccacacttccagcctggaatcccctctctgcacagcctggtcctatcccaggaccctacactccccctcactacccccagcatgcctttcctacagccaggcaggacttggcaggagcatgccacgccaactttagaccccagtgctggctacatggggggaggagagggcaactcgttttttaactattgacccctccttgatgtctggcaaggggctaattagcagcaaacgtcttctgaatcagtaagtcagagaatcggtaaatgaagaaaacggacatctgtataggcataatagcatccccatgcagtccatagcaagaagagaccccagggtgggcgccttgtgcacaagggtctgtctgagatagatgccaaggccaatggacacatgccgtccacaggtcctggctgtgtggctcaggatgcactggagccaaaagtggctgcataccagaaatgtccccccacccccacccccatgaagctgatacagctggaaccatggtccccctccctccagtcagtgacactgaccaccggtggctcatctcagctgttcttttggcagatgccattcttttgctccccagagactgggtgatgtctgagagatagggttagggttggcaaggttggtgtgaagtgggtaactttggagcagcgagcgacccggtatgcctgtgcatccaggacacagggcccaggaagcatgagaatagcaggagccttggaggaggtgcccttgggggtggaatagggctcttgagggcttatcctaggcccaaggaaatgaagggaacttctttccttcttgtccctttcccccaacacacccccaagttgagctagcatacccatcatgctaaacaggtttaacaggttttatgatccaatctgattatcttattatgagttacagattgttttataggaaaaatgcttccccccatatcaataatagcttctcttttaatttagagaataatttcaaaattataattacacaagtacagtcacgaattgcttaacaatggggatacattctaagaaatgcgttgttaggtgatttcatcatatgtgaacatcatagagtgaatatacacaaacctggatggttgagcctgctgcacacctaggctatatggcgtagcccatcgttccttggattccgtacagcatgccactgtacttcagtactgtaagcaattgtaatacaatgctaaacatatctaaacatagaaaaggtacaaagtacagtataaaagattaagaaagtggtttgcctgtgtaggtcatttaccatgaatggagcttgcaggactggaagttgctctgtgtgagtcatgagtgagtggacatgactgcacactactgtggactttattaacagtggacttaggctacactaaatttataaaaaatatgtttcttcctgcaataatacgttaaccttagcttgctataacttttttgctttataaactttaatttttaacttgatgactcttataataacatgtagcttaaaacacaaacacacagctgtacaaaaatactctctttatatccttttttctatgtgatgtattctattaaaaattattttattttattttttgctttgtaaattttttgttaagaagtaagacacgcgcacatagtaacctagacctacgcaggtcatcaagatgtcatgaggtgataggaatttttcagcctcattataaccttatgagaccaccattgtgtatgtggcctgttgttgactgcagtgttatgcagcacgtgactgtcgtacatagtcattatcaaaaaattaagggcagatttttaaagagcaaagaagttcattcaaaatctcagaccaaagggatactactctcttttatgtgtatatccttccagtctttaccatgcaaatatggaaatatatttttttaaaaaagaatcctactacacatattactatgtactttggtttttaaaaactatatgtaatgactgtccttttgtggcattaaatatgaatctgcagtataatgtggaatcctgtgaaggtgtcctggtgttcataattcatctgctgtttggtgagcacgaagctgttttcacagtttcagcagcacagtgaagaataactttattcttctatatacaactttataatgtacataataacatatatatgtaaaataaataactgtattctatatatacccctttttgcagatgtattctaacagaaggatttataggtgaaaagttatgttttttgctttattttgccaaaaggcacttaagaaagcctgtccaaatctggattctcagcagcagaatatgaaagtttctgactcctcacacccatgccaacaggctgagcattatctttattaatctgaaaggaagaaaacaagtgaatgggacatagcattgggaaaatgctttctgaacccacaattactcttctaaaacacaacccaagtgccacctgtacaacctctaacaaaacatggctgaacccaagctggggcattcttatttctacctgtagttaagataaaattctgatcaacagagggatccggagggtccctggaaatgtattgagaggagattgatttgatccatagctgaagtttccttgaaaaaagacactggctgggtgtggtggctcacgcctgtaatcccagcactttgggaggccgaggctggcagatcacgaggtcaggagatcgagaccatcctggttaacacggtgaaaccccatctctctaaaaatacaaaaaaattagccgggcgtggtggcgggcgcctgtagtcccagctactcaggagactgaggcaggagaatggcgtgaagctgggaggcagagcttgcagtgagccgagattgtgccactgcaccccagcctgggcgacagagtgagactccgtctcaaaaaagaaaaaaaaaagacttggccttttaatgaaatacagcgatacggcagtaggcaccttcaacactccctagggggagtggacatgaacgtttttgcatgtaagacttggtcgaaagccctggtccaggcctggatgtgccacttgttacccttgtcacctggacaggcctcttcctgttttcacctgcggtggcttggggcagtgaggggagtgctggggcactggtcacacagatcctggttcctccctgcatcctggctgtgtgactggcaggcgatctgcagaaagattgtgtctctgacccctgggatagcgtgaggattagagcacatggtgcgagcttggcacttggtcattgttttcctttggctctttccctttttcatctgttccagcgagggattaaactatctgatgtctaagaaccccatgagatccaatttcctgaggattccaaggcagcccaggtgaggccctgctcttctaagtatgaagttcagagtcgctgtggaatccccactctgggaggcagtgctgtgcgggccctgcgtttcacacaggtagccacaggcccctgtgcacacctgagaggcagcctcccgcggagccctgctggactgtgacgttatccacatgccttagcagatgtctgtcattgtcttcttgcctttgtgggtttgtcctctgtttagaaaaatgaatttcctgagggcaagaccaggttcatcatctcctctgacttttgcctgccctcaaataagtctggaactagtacgagcacgtgtgacggaccctcattcaggggtaactgactggttgataaggagtttgactggcaaggaagtgatttcaatgggtcagcctctctggccctggctgtgatgatctgtttaccgcagcttaaccttagtggatttcagcccatcggcacaacccacatagccccattcagctcatggctgcatttaaggcccactgatagcctcggatttggggagtgttaaccccatgctgcttgggtatgcttcgacccaacctcacgggttaaaatcatgatggtgaggtattacagggcccagtcatttgttaggaaataaaaccagactgtttccaaagagtagagaaataggatgactcatgaagtattaaccacttaaaaaccctccttaggcatgtcttcccttggctcccttgagcggtgtcacccgacagattgcagtatgattgtcattgctgtgttgaagttacccaccctgaactcatgctgggtatcctcagtcagggcatcgttctgtttgtttctactttgtgcacataactggtaccttttcttttccctgccctgtctcgtcacttataatataaagggagttaatccagccacttgtatatcctgagtcctttttgtgtatccagcactttgtaaatttactataggcattcattcatcctcttcctcattcaatccacaaatattgaatatccacaactggcaggataacagccagttgctttgaacaaagagtttctttctaagcccatgaatgtgactatgcctagcacagtgcctggcacactgaggtgcccagtgcatttataaaaagcaactctcagggttcttgacggagctgtgtcatactgaagccccctggcctagatagattcgcctggatgaaacacttccctgccttcttaaacagaatgcattgaatttactttcatcttttcctgatgcctccaagccatcattttgaacatcagtgctgcagtaggatgatgtgttgcttctgttttattgaggtataccagttctttgcccttaacgttaaatcagcctgagtgttgtctttgtgagcccttgtgtttgatttctgtagtttgcctccttcccagcagtgaaactgaggatgcttattttttattccatcagtgaatctttgtgataacaagcatcttacatttatttagcagttttcatgtgcattattttatttaagccttatatcagctctgcaaggcagataggatcatttccaatttgctgattaaaagagaaaaaacaaacaagcaagcaacagactgaagctttcaagagctcagcaacctgccaaagatacatggctagaaggaagacactgggattcaggactgggtgtcctgattctaggctgggactctttctgtgccaacatccttcttccctttagcaactcccaaccttctttctagtttggtactggtaatctgccacaaagcttgttaaaattgggcgcaaaatgaccaggtgaaggtttaagagtctctcctttggagacagtgtttgagatttagtgcctgggttttgtggcctctctctatttggctgttcacaacctttttcttctctctgtctgaagtgtaagcaaggaggaagggtaacagatcgaattgccagatttaacaaaaaacaaaacaaagaaacaacagaacaaaaccaaacacaagatgcccagctggatttgaatttcagatagacaacaaataattttttgtaagtatatcctaactgttacatggagcatacttatactgaaaaaaaaattatttgttgtttatctgaaattcaaatctagctgggtgtcctgtattttatctgtagccctaataccaggactgtggctgggtgggcagtgtctgatctgtaatgacagcagagtcttcagtaagagtgggggctgggaaaataaattaatgggttgcagaatgtatagtgttaattagataatgcttcctggaaaagacggatcttgagctattatttacagggcagtagggaaatgatgtggccgctagctgcagaaagagcaactcatatgaaaaagaatggcagaccggagaggccaaggctcagagacacatgcacacaccaaataagggtctgtttactttgactgtaaaagtgtattactttttgactgcaacaatgtttcatctcctgcctaacataatgaccagtttggttcctgtcctggaaatagagaaaacggtgccaccttccccacacacttgagttgatctgacattgatagtttgaaaactttggttcccccaggcagtaaatttaaggagcaaccctgtcttgaaaacggaattaggttaccaaagacttccggcagttgagaatttcttgaaatccagaatatcatattttcccaataatgccttcttgcgatctcacacatcatgcttttaaggccgattgctactactgttaggaaatttacctgtgatggtctcaggtaatagaagttgtggataagttgaaaattgccagcctgttaaatggaatgatgtagcaaagaaagggcattctttttgaacacttcctccaggtgtgtgagcgtttcacactctgcattttcacagtatctttgtgaaggtagctctgggttctcttgcaccctggagaggtaggaacatgcctagtgccctcctgtgagtctgtcccctctcttctcttattaggggcatttgcattacaaatccacagaccaagcaactctttttaaaacatttatgttcaactgcttttttgagtgcttatcattccagagaatgtgaagatacatggcccaaaacctcctccctcaatagtgtcttgagtgcggagtctgtgggctgtcctgggatgggccctcaccttgctttattcccacagcacacctcactcccagatgaggatgtgcgcctatgtgtgtccctgtgtgtgtggaggctgagactgcaggcacttgcccaatgccccatgtagcaccactgagattcaagctcatgtttttttatttgaatgtcatactttctacttgccaggttactccatcaaaacagtgataacaaaccaggacagggcagatggtgcatagtggtggcagaattggacagatttaactgtttctttaagaaatatttactttcttgagcatttactgctgccctaagagactagctttggggttttcctagcttcgcagaagtgtggacgttgattccagcttttcccaaacatttttggccttgaaatgaagctgggaaccatactagatcaagctctctggccgtgagccccatgtctgtgggtttgaatgatctagagaggaactgcatgctcaatcagaaccagcaggaagctgagcagggttagaaggctcagtccctctgagagtaggaagagggcatacctcaggagcttgccaagtgcgcagaggtgaaagggaatgtgagagagtctatggggcaggggtgacatttgaacagggaaggatgctgtggcatagatatcaaggctcgaacaggcagctccccctgtacgccaggcattaactggattggtagctggattgcgaagaggtccaggagccctggaaggagggccacaaggtggaagattctcggtgagcatagggcagtggccactaaccaactggttccaaagtgttttaatgatgtaagtgcttagttaaatattaaatgctttattacacatactaactcagtaacttttacaaataacccggaagttagattttgttaatatctccatttcacaaatgttgaaactgaggcactgagtgattaagaaacttctctaaaattgtagctagaaagtggcacggctggactggaaccatctgtttaactttgaaggctgtgctcttaattacaaggtgacttttgtctccttatgcaaatcgcctgttactgtctctgcaggttgatctaggctggccactagaaatagttcacttcaaaatgatgacatggaggtgactgaatggggtgggtcatatggtacagccgtgatcatctgtccctgaggtcctaaaatggagtatggtgagatgtttatgcttttgaaccttcatgaacttttccgctcttccttgggccaaattccaaggtccaggacttggaggaagggaagtagaaacccactcgcctcctcaggaccctgcctggctacatgaaacccccattaatcacctctgacgcccgggcttggtctgtgaaggaacgtgggccgtatggcagtgatgggaggaggctgagatagtgctgaagatgcacagcctctgtgttccatttagaaccgctgaagctccccaggtgcaccaggagccttcccaagacctggatccgctgcaaggtgatagccgtggcttggttgtctgtgggtggagccgaggaaggcagaggtgtgcgtgtgtgtctctgtgtgtgtcatctctgtgtgtgtctgtgtgtgtctctgtctgtgcatctctcgtatgtgcctgtgtctctatgtaatgtgtttgtgtgtacatttctgtgtgtctgtgtgtctttgtaatgtgtgtgtgtgcctatgtatgtctctgtgtttgtgtgtttgtgtgtctatgtctgtgtttgggcaagactgtgttccacccccttccccaggcttgggacaagctcacattccacaggtcctagaggaaatgtttttgctgtccagggctttgggacaatgggcttgctatgttttaaattttgggccccaggaagagagttgcccctgtgttaggatggctgtggctcagtcacatactcccccatttctcttagccggccccagtgtgtgtcctgggggcgtagtcactgcccttccaagcctggagaatgactgcatcgtccaccgtgatgaagtacaggctttgccagggcttagcagggggaattggaaggccttaaaaggaacatttagaaatcaggagtcaaacgtgacttggacattaaaacttgattttgcatccagctcatgataagcatatagcagcatatacacaaatacatacaaagcagtgtgtatgtggcaatcatttggtgcctcactcacctccaaggcttgttaggggtgccatgatttgaaccatctcacctctgcatttttgctggtgtctccctcttctcagaatgctagtcctttgtataaccctttccactggctggggccacagaccttacaggactaagaggccatctgaccccctttcaatgagtagggtgctcctctttgtgtaggatcacaccgcagttttagcctgtctgaactcttgttataattctttgctcccctatgttcctggagggcagagaccaagccttgctccttgtactacctccaagggtatgtgagcctgccatgtgtatgcagctagcatctgaatggatgaatgaatgaacaaatgcaccctttctcacctccccacgaacactgcactttccccacatctgtcagtgaggaatgaactaagtgagatgtaccagcacccatggttgcctgtcttcccgatcatacggtttacatttgcagttcagcatccagtgctgtgtgctaggtacatccacagcatcacagtttcatttcatgctgctgacaactgtttaaacttatcctttctggagggagatggggaaaggaaattaggctccacatttgtaccagtaaaaagcttcaagagagatcctgagtgcagcgggctgaggatcacagaagttggcaggctctaggcctgatgctcatagggtggtatcccagggcttcctctgacccagtcagtaggaacaccgctccaggaccagagaatcctagaggacaggagcccaggacccgtgggggccagtctcatagctcctgcctttgggatttgtgggagggtttgccttatgggattccattctctgagctccatccatgtggccaggccctatgccctttttgcctgactcatgcctgagcttggacactaaaccagacctgcccagtgatgtccctggccagcttctacaggaggacacatccccacattgggagcaggtcccagactcaggtcttgccctttctctgtccccaccagctccaaggggctgtgcacttggtaggctgttggagtatcacaccagattccagaagaggggccaggagcgggaggattatgccctggggccattctcaccggactgttggaaacagtctttggtacctgctgagagagccagtgccagctgggaaatctgtgaggtctccctgaggaagcttgtcctagaaactgcagtgaggtgactgtgcggcaggcccactctcaactcgaggggagcccctcctgcctgctgcaggagtgggagcgtggggctagctgccagtgggatggccccagccggaggagctgggcagtgcagcgaggcgccagctgtgcctgactcctgaggccttctgctcaccggaaggggggcaggtctgcagcccctcccccactgcagggccaggacaggccgtcctgagtgctggccctgaggatctagaccctttggatcctatgtgcgggggacttcccaagagctcccggcccacgactgagtcacgcggcttcttagcaacttagtcaatccaaacgtggaggtgattggcatatgtaagaaccccctttcccgttggcgtgtatggtgtcttctcgctgagccacagcacctggtttagggctacaaatagtctccccgagggaatgggctcatacgccgggtgggcaaggatttcaagtcgtcggcacaagaagagacactatattaaggcctggttatgtttagaagccgtccagagaatgtttggcatgctgaatataaactcatgcttccgtctgctgccacactttaagatttctcccagagggacccagagtgtggggcgccctggagaaggagctgggaatgtctcgggggaaaggttccttcctcgggaactgggtggcatgggagagtagcttcaagcttgctcatggctggacttcccagacacagggtggggctgttggatgttacccgtcatgtcagcattcagagcccggcaggaaaaagcctccttcaaagtgaacccaattcctaaagtcctccttaatggaattcctcttagaggcaggcatcgactggctaactggtatgatactttggagttcagttagcccagaatggtgaagaaaatggctgtcacccaaaacacactgaattgaaggacggtggtgccagaaaagactgtgggttatcttatccagccccttcatctataacatggggaaactgaggcctaatagaggatggtgacctgctctactgatggcattcagcactacaccaaggtcacgggaggggtctgctctaatagcatgttcccatggactggaaaacgtcagaagggtagaatacaatacaaacaccgttaggactgagatgtggccagcatgaagtcccatggtcctgtgtgagtggaaccttggtgtggaaagtggcccctggcagcgttgggacatagagcagtttgggtggggttctaactgggtatggaatttcaacagactcgcagggagattctctagtactgtctcaattggaatcatcgttttttttaaagttaagaagaaaaatggaagggctcaggtgaaataaacattttacaagcagatgcttgcctctgccagcctgggggcattttgagtaggggcgcagcatgcaaagcagagaagagctcccacgtctgccccctgccctcctcccctctggaattttagcccctgcttggcattgccatgggtgtgaaaggtggtgtctggactcaggaggaaggtactgcagagggtaggaagagctctgcagtggtcccacggatctggctttaaaccaggagctcttgcgagtctggagctacgtgagttctctgagcctctgtttcttcatctgcagaatggggataggatggttgtatgggaggaacgcaccttgcacagtgtctggcacacagcaccctccgaaaggggctctccatgtactaggtgctcaggaaagattgcaatctgactaggagttttgaaatttgtgatttacttagtcttggggaggaaagaagagtcgttttccatggatcagtatgtgtagatgtggttgcagagacagtcagagaaagaaatggagccaggacaaaggggtggccccagcattcacgaaaggtttcagaattcctttttgggtttttggctatgacacccctcttaggagtcatgtttgttcactgtctagtgagaaggtgatcttctagtaacctccttttggggggcctataaggaattccttcttgctgttcgtgccttctctcacaacactagtgtgagaccagagaccccacctcacctccatcaggtgaagatccaaagcagagaggagtccctgactggaccttccccaggggtgggttgtgatgagatgagtgattatcaacactgagtgaggggtggtcatgggccagatgctgctgaagcctttacttcctagcagccttgttaggtaggagactgtgactctcccattttacagatgaggaagttgaggtagtaaacagtcatataacttgcccaagcacacacaaatagtgatgttgctttgatttcagccagacagtctggctccagaatctgtctctttcatctctaagccttttaagtagcagaaagagaaagatcaagggggcaatggggcctgaatgtgtccacaatgatggcaaacagaagaggaagtgtgctgggctgcggggccattgatgcccatgaactgaagagcccgaatgcctggatgatgaatggctggtcaccccctcatatgggcagcagaggctgtcttcaggctcggcggctcagctgccattggcctgaatggagtcctcttttttccaagccctttcccctggacaattgctgagctctgccccctttcgcaggcacctccccatgtcgcaggacaccagagtcttcaggttggaaggaccctggaggtcaccctgtttattcttccacctgactcaggagtcctttgtagccttcttggcaggacctgtcgaatcaagcaaggatgatggagaagcccttggatgtccatctagttgatagaaagttcttgttcataaactcaagccgaaggctgccctggagcagctccagccactggccctagccaggccctctggtctgttccctcgggccccttctgaaggcaatttctgagtgaactgtttcagatactctaatggaagtttcttggccttggccctattgacatttggggatggataattctttcttgtctggggctggcctgtgcatggtaggatgtttagcagtatccctggcctctacccactgggtaccagtagcagtcacgccgtacccccagctgtgatgaccaaaaatgtctccagatactgccaaatgtcccctggggcgaaggtggccgaaatcgcctgggttgatctgctgttctaattctgccttgcccagtgctcagagagcagcccccaccccagcctccgatggccattggctgaagcaaaaccatctcccttcacctggcctctgctgaagcggcctggaataaacaaggcagcggtccccaaggccacttcctggccctggaggtggtctggtttcctcagttgccctgtcagcaatgggtggcatagggcctgccccacccttctgtccttcctctcctcaagggtggctgatgcaggagttgagggaccttagggtccagggcgtggctggcagtggagggatgggttatttctaaggtctttcccacttgtccttccccagggtgtgtctgcagtgatcttctcatttggttggtgtctgccatgctgcagaagggaaaacagcattgcacgcctgtgtcctggcttagggtcatgagagcgtgtttcctcccatgtgggttctgcaggtgcttccttgggctgcccctttccctacccctacccctaaatacatgcccaccacctcttctgcacaccgtgggtctggaaattacccaacaaggagacgggagcaaggaagagacatccccaggctctggaaagtcctgaggacaaagccaggattccggtcttgtcaggttttctgtctgcccagtgcagaagaccttagtaacctgccctgttatctgtgtcctgactcagaaatgtgttggttgaaacgtcaggctttcacccaaaatgcagcacaatcaccctgtccctagagccacaaaaattccctttctctgtttccagtttgttctgtagcagcttggtgtgaagacagacagtctagagcatcatcaggtgagatgctcacctaatgtcccagacctgcactgtgggccttggcagaggcaccgacttgaagacattactttcttctcccactctcctgctcatttgacgaggtctcctaggctgcctaaggttgtcagaaggtctgtatggtgagacctcaattgacaggccctctgaaaatacagttaccctgtaattaaattcttatgctaaaaaaagtcttcatcaatcatacaaaataagctgcctgcatttgatgtgtgtgggttgcaggaagatttggggaaacgtggtcgggtttgaagaccttcacaagacatgccaggtgaattctgtgtcgctgctgtcatcccgccttttccagtaatggcctcctttctttatcttggtggggagatgctggttacccccaaggatgctgaaattagcactgcattatttgttgggggaaatagactctgtggaccgttgagtgtctggcaaagaaaaatgagttcaggactaaccctgacatacctcttggtggggagatgctggttacccccaaggatgctgaattagcactgcattacttgttgggggaaatagactctgtggaccgttgagtgtctggcaaagaaaaatgagttcaggactaaccctgacctacctctttgttgtgatataggatctgaaaaggcccctttgacctccagtgttgccaatctgtaagactggataatgatgtcacactgactttctcagagcagtggcgaggaccaaatcagactctgcaagacaaatgcagtttcaacttatgaagcatacacacaagggactgatggattgttattgtggaagaaaaggggggattgttattttaaggaatcttgtccttaaagtaatcttggttgagcgctccacgtgcaaggcagtgttctgggtgctggggcgaggtcacctgtggaattggcaccgaagcaggtcaggtgggagggagtttagaggaaggccacgtcactctggttgggatgctgggggctgttgtcctggagaaagtggcctcaggctgagtctggcaggtgggtagaatttccacagggagagatgctggcctatgcagaagttctcacccaccctgcaagtctccaaggcctgactcacacagcagagtgagccccccctggtgctgggaaattctgaagcccatggggacaaccttgtccccctggccgtgctcttatcctccctacctgtcccatgccaggagcgcttctatgctgctgccttggaagactgtcctaacaggcggcgctgccgcgctcagcacctgggctgggaagaagagcacttagtttgcctcttggagccctggggctccctgcagcaggaggtggagagggagacgtggagggtctgcttccatcaagtcaaggtccgaagggccccatggaggagacgggtcagcagcctctgcccttggatttgccaagtgccccccattgtgttggggctcagggagaatactccagtttggagggcttcctggaggaagtggagcatgacccgtgcctcaatctagaggagatttgaaggggaggctgtctgggggtgggagagacagtgcaggcccagggctgagatggccagagcctgtttgtgggattctgatgagatggcttggctgaggcagagctgtgtggggagaggcaggggaaggagatcagggcggctgggagcacaccttctggtcccgaatgctgggctgtggtgctgcactgtcctgccatcagcagtgggccttctgtgtgtggcaggatgagacgctagtcatgtttgggtgtgattaatctggccactgtgttcacacaggttagaggaaggagaatctggagacaaatgcctgcccagcgaccactgcagggtcccgggagctgggtgaaagtggcagagctgggaggttgctctgaaatgctgatggggatggagtgggggctgtcgggaaggactggatggagtctgtttttccagaaccccttaacccagtggaagccccgcctttcatgtgggccccgcacagttaggctgcccgagtccctctgtcctcgcaccctcacctggctctcttgcctaagcctgtcacagaagccctgcagagcaggaaacacagagcagaaagccacgcacacagcttgtgtttcctctggcgcctctaggtcgctctgcagccacctgcttggagtggtgataagccaaatctttctttagaggagcgaaaacacagctagccagggctgcagctatgactgcagcctgtagggaaacgccgggaggaacaggagactgttgagaaggggacggagaacctcaccagcagctgaattgaattccatctttgagacccaagagagggaaaatgcctttccgcatgcatgctctcctagctatgcttgtaagaagtgcgtgcttctggttgggagagcccaggaacggagtccatcctttctcctggcctccagggagagcccagacactcctgaccacagactggcttgtaatttggcttttctgagcatggcaagagaatcctgcatgtcacttgggcctgacacctgcttttgccttctccagacacggcaagactggccttgacttctggttccattctcgtttccctgggctgctctccaccttccaggcttagctggagtaaccatttcagagctggtcgtttccccgcagctttagattccattttggtgaggaaatttacattacccaggtgtgcacttgggcaggctgagcgacctgagtgaaatgaagccaaatcctggaggtgcaggtgtgaggatgggtctgggtgtggggtggggtggagggctgaagaaggaggcgtaacattgtgtaaggttggatattaaacctactgcagcaaaaccaactctgcccgcttccccgggtatttatcatgcttaccttctaccgcacacaccgtcagtgtgaactattgcatagaaaagggttttccaacattgccaggtcagagctgattaagctttcacttaagaccaagagtggattaaactttgggatctgccctcctccggagggggagaagctggctgatgttcactgacatgtggctgcatggccacatcagttgttaaatattgagaaacttcagctgtcctgtgtccctgagtgcccatcccccatccaggacctcccacccccccacatttcctcagtggaaggctgctccctggactcatttcggttggtgggtgccaccgtggttcagtattttcagaagttcactgtagcctgcaggttatgccaagtcccttgacactgggtcctcatatttcctgctgctgtattttttccttatgagatagaaatgagacttgtcaaaaccctactgactctgttaggcccagcccaaatgtcactttgtctactaagactgccctggtcacctgtttcttggcccacctgacacttggtttatacctcttttatggaaaattatatttaacttcctattacagctatggcttgcaatgggggcgattttaccacctggggacatttggcagtgtgtggagacagatttggttttcacaactgaaaggggagctactggcatctagcgggtagaggccggggatgctgctgaagagcctacagtagatgggacagccccaccccagagaatgatccagcccaataagtcagcagtgctgagctgagagatctacaagcctccgtgtctgttcagctccttcctgggagctcccagagggcaggacacagctgcttgcatcttgccccaaccctctcctccaggcccgcaacccccaggaaccagggtgagacattgcatttagttggacactcaataaatggggctgaattgaattcatttagttaaatggaatcaaatcgaattgaacctaagctgccctgcagatcgttaggcaaatgcaccaattacctggtgcagtagcttagtctttcctttgcttcacaatcaagaagtggcctccgtgacctagactggggacttagggatgagagtgaaaattgaaaatgcttgcaagctgtggccttgagtggtttcagacacttctcatttattgtgcatcttaatgacacaagtaactctctgaccttcttgtctcaaaagtgatggggccaaaaacagccactgccccaactgtctgttgaggaaggttggaaaagtgcaggactgtccagagtctatactgagaggcagtgtggtatggagctgagctcctcagtgttctcacattggaacccacagagaagatgctcccatctgaactgtatgcccaggaaagggggcaggcaggcggctggctcaggcgctgcccttggccccaaggctgtgggagcagagcctgtcacaccagcagtgcattaggggcacactgtttgtgtgagcactctggtgaggcagaaaaaacatgacctgaagaggcagatgacctctgtgtggccagccccttcaccagcgctagctgtctgaccctgacctgtgggcttgccctcctctgtaaaggggaatagaaattcttccctgcgtccaggcaggggctggacttggtcagcttacgtgcctctccccaaatatactaagtgctctatatgcattgctcccctcccctccacctgcattcccattccacagatgaggccgctggggcacagagagattgtgttgcttgcccagggtcacacagctagtatgcaataatgaccggtttcaaactcagagtccatgccttggccgttctagagtgctgcagcatcctttctgtccacttctcaaaaatgcagcctctgcccatccttccatcctccatggggtcttgaaactcaagcctgctttgcctgggtgtttttaagctatgcttgcaatatgcgcagtcatctctgggctttttatgtgtcactcattgatgagaaccaaaactggacaagattagaagtgaggctttccttctttccaagattggattttctgttccacccagaacaacctgctgttccccagctgcacgccctggtttcaagtaggtctaaaattacaagagaatcaccttgctccaaggaagctggcatctctgtttcctgatgaaagtaggtactagagagtggagctacccagaaaccagggggtggcatgttggccatgtggaggcaaacagagctgtgttttcttttcttggccttcttaaagatgtatctaatttggggcatgttttgtttggttcatcttgtatctggagaggttcttcttttctccctaagtgacatccctcttgagcccacaattccctcttctcaaggtgagtaatcctctctctagctgttcataattgctaattagtgaacaaagaggctaaccaacaaaattagctattgggccagggtttaggattgaaccaaagggtggagaagggctttagtctgcttgttttttatttgtttgggttttttttccttaaaaaaaaaaaaaaaaaaggaatcggccaggcacagtggttcacacctgtaatcccagcactttgggaggctgaggcgggtggatcatctcaggtcagcagttcgagaccagcctggccaacatgcggaaaccccgtctctactaaaaatacaaaaattagccaggcatggtggagggtgcctgtaatcccagctactcaggagcctgaggcaggagaatagcttgaacccaggaggtggaggttacagtgagctgagatcatgccattgctctccagctgggcaacaagagtgaaactcagtctcaaaaaaaaaaaaaaaaaaaaatcgcaacaaaacatacagcccttccccactggtaatttatcataatcgtatctaaagtgttcttacccaacatgttcaccatttgaggaaaagttactgatgattccttatctcatcagctatggaggcctcagaggggttttccaaaggaaatgcctgacctcagcataggatggaagaaggaggtgccgttctccgggagggtgtgtccaccccagcccatctgccaccaggctggcctaaaagaagcggcgtcctcctgtgtgtgtgtgtgtgtgtgtgtgtgtgtgtgtgtgtgtgtgtgtgtgtgtgtgtgtctctttgtcatcttcagcatatccagtgcagaaagagatagaggcattcatattcagcaaatgtttcttggcatgtaattacatcatctctttaaaatctcattacaaccctttccatttattggaccaagagattgaggctaagatttacagacttcctctgggccacacctagtaagtggcagtaacaggaattaactatactctctaaagtcagtggccgtagtgttaggaatttacgactaataaatgccaattctgttgggaagacaaaaattatcatataagaaaggacttgaaagaaaggagaagtgctaaatgacgagtttctaagtgcactaggctttctggaaactgcacaatccaggttaaccgcaagcggtgggcagtttgtgggtgagagaacagtgcgcacgcccacatggctgttctgtgagatcacctcttgggaaatatttagaaactggtgcccactttcccaagtttccagcaaagcctacagtcactgtcctcactggaggtgcagtcagtgttcttctgggcccccgagactgggaaggcagattcttactccatttctgtgcctcttccactgccctctcttccctctgctgccttctccctttccttctgctctttgtagaaaataggtctgcagcagccactgaactttgtctctctttgttctgctcttggtcttacttcccttctttctccttccacctctcctggctgatttttcatatcatccccatgagaaagctttttgccttccttaaaaatcttctcaaaagtgaatttctgcttatggtttaaacagataccattgtcagcaggggtcagtgatgacccacccatctcctacactccttccctttgctctctggttcccacattcgattctgtttcctcccacttgctcggtccttcgggtagtctcagcttgccctgatctctaccacgtgaatggagggaaagctaagccgtccttcctggctttccagtgagccagtgggtggaccttcagcccatagactcaccttcctgcctatgtgagcatccagaaaacttttggggtgtgttaccaaggagacaatggagtatttattgtactaccttccttagactttcttatgcaacctgccctctttcccggattgctgtgatgctgcagggaggtttcttaaattaatcttgtcaaaatagccttcgaatccttttggagcaggatttttttttttttttttaaatctcacaagacacaaactgttcaagggaagaattaggaacaaagacaacttggggactggagagaacttggagagcatttagagaaaagcggggaaatgattgatgggttggaaaataggagcatggatgaatggtgaggggaatggagatgatttaactgggacagagaggctgacaggtgacctagtaataggcttccagtttgtggagggttaggacatggagactggcttcccactaccagggaagaaaagacacttaaagtgggaggtaggggagcctgaggctacaggaagaactccttatcacagggtctgttaattatagcaaggcaggatggatcacaagctcttccaccaagcagtcttcccagacgagagcagcactgggacggtggtagggatttctgtaagtcatccagtgcacagcttcccgatcgcttgtcctcagatagtagcgagatggctgcctcagcatctccagggacacgtagtaaaaaatacaatttcgtgggccctatccagacctcctggtttagagtttctgggaggaaagtccaggtgtctgtattcttaaaacacacacaaacacaccccacccccccccacccccccaccccacacacacacacacacaccccaccccaccaggacaaatgcagaactaactcattgagaaccaagaggctggtgatgtgaggaaagaggaaatgcctcccccggattcctcaggttgctgcctgcagcatcccgctagatcttccactgcccgggagctgctcaggagcccaggccacacctgccctggtggctccgtccagcatccctgctgggtcacttggaatggacgctggggcatcaaagctgccctacagctctgaagaacccctgcgtctctccctaatgacaagggtgctgggaaaaatgctcattccatgtttttatctggacttcaccagcagtcactgaagtcttaggtcacagttctgtggagttttccaacgggtccctcagacaccaccgctgccccacaggggctagaatggaatgagcttgggagtcaagagatgtatctgccttgagcttgagcaggtcattttacctctccccgttgcagtttctttctctggaaaaggagacacccggactggacagtctctgaggtccatccagctctacctttctgtctctactggctgtttgaagaattgcaatgctcgaagagtataaagtagattcagtgtaatatttcgtagtgaagtattttaaattcaatgttttttttttctttgcataacttatcctagggaagttgggaaggatgaggaaaaatatacgaatccactcgtctccagctagctcagcttgtgtgtaggcctgccgttcaccacacacgaccatgcgcaagctctctggtcccttggtggcagcataccaaactacagattctgttctttggcctcagaacagtcttgtgtatgttttaaatgtgtagcttggaatcaacgagtatttttcatggggagactaggaaggttggggggctgggatcattatttcacacacttatttgcttgtttcttgctgaattccagattgcggtggtactttaaaaaaaaaaaaagctccaatatcaattttaattttgcttctaaccttttggaccagccacaccctgacacttaaaaaataataatgaaatgttagtataagaaaaattgctagctgactatcccagccttcctccttagtaactaaacctgatttggggcacattgctacctagactgtaatagactttccagtgtcctgcatggccaggtgagctctggacgatgatagagataaactaaattactgtaggctataatttaaggaagcctcctttaaaaaagtaaggaaaggatccttttttcctttctcccttcctcccttcatttctccttccctcccttctgcctccctccctccttcccagggtgcagttgtaatggctggagttctagcagccactttggaccataagatggaagccaagcattgaggatggcaaagcagaaagctgaaagcctgggacaggatgaccatggggctgccatcccatcccaggactgtctcccttcagacatcttttatgtgagagaaaaataaagccactattatcttttgttttatttatgcagctgcaccaaattctaatgaatccatataagttccaggtgagctggcttagatggtgagaaccaaggtcaaaggcaaagggtagccctgataagcaaatgccactgctgagttgctcagagcagtagacttttgctataacatagcacaggaaaggagagattttggagacagatggagtgtgacgtcgagctctgcctgagaccgactgtgatcttgatcaactgattgtcttgagtctggatttcctaatttgtaaattagagtaataatctccaccccgcaggccattcattggcattagacatcgtatgtattaggtgtcttgtttagtacctagcacacagctggtgcttaaaaatagtggctctgtgtgtacataggcacatggtatgtccccctggccacagacactgtgctatgcgctggggacatacagaggcatacggtgtagccccagctctgagggggcgtgaaggccactgggacatctccagtgttgtagcatggggcccaggtatgcagcctgtgtgtgccttcatgctgtgatgcaggcttgggaatgcatcccaagcctgtgtacagtgccagagattgaaggatcccatcttagactggcacttcttggccttcactcacgtgggcctgtggctcgggatacttcccttctcctttactccttctgaatcctacatgtttttgtggcacgcggaagtccttcctcccccatagacccacccaacctagtctagctaatcctcaacattgcactgagcttatttcaagaccacacagttcaagacaacacttgttctcctgctggggtgcatgtgtgtcctctccagctggaccataatcctcctgaaagcagagccccgttctgatcgttcctttagtgtggaaggcacagtaggcactcagtgttttgatggagaaagctgagttttacagttaagaatatttttttctgcgagggctcagatcaggcctacagccctctctctcctgtggctgcagactgtaatgagggagaatggaaagagagcagggagggatggctcagccccaggtgcacacatggcccagcccagattctaggcccagcgggcatcaggacagctgtgccaggcagacacaggagagccttcctctgacccaggtgtgaactggatgataaaagatggtttctcaccctaaggaaatctctacataaaagaagttccctcatcaaaatcctcccagtggccgtaacaggctgttagtcacatgcaataatggcctggggtgagtaggtatcaggcagctgggctgaactgcctccttccatcaggagtgagctcttgcactcccacatggtcacagtatggccctccagaggaacactcccctcacccaagagccagtcctgcatcctcttgtcccagttgtgccctttccctggctgaccatagcattgtctgctcttggaggttccccgtaaggagacaagctaccttggatggcttcctgatcaggggcctgcttctccctggaaacccaccttgtctcatctcataatatactgaggaggatcttggaaaccactaaaatgatcattcttcccctctccatatcatttctatattcctgcttttggaaactccacatcattttgacctggctcaaccaattaggtagtccactccaaataagttaccaacccgtactcacaaaaccactttcagctgtcggaggagaggtggctatctggcgctgtttgcagatgtctttctcttctgttcttgttgaatccttccccagtttgctggggttcccagtgggggagtgcttccacagtgcccaccccaccccagcctctgcctctccccacccttcctgcttcctgttttctagagcttttttctttctttcccctgaaggtgatctctgtataagaatagccacaatatgtgtgtgggaggtttagcaacataacctggaagatctcttacagcctctggagtcttgatttccttgagtgtcttggactggataatggtgtgtattaaggtttggggtagggggacggtaaagaatacctctgcttcttcttggacctgtcagtgaagcacagtttggaagggagaaggctggggatgttcaaatagtaggcagaccccctgaacaacagtagcaggtgtggtccaaacttactggccggcctgcaggccaggaggccagtgccatcatcccctcgtgcctggtgacgatcagcccttagagctttgagtgccagtttagcagagagggtggactgatccctggtcttctccaaggacagcctaactcatcagtcagcatcccagccccagaccagccccaaggtccactgcatctgatgtgagtcttcagacctaaacgagaggtgaggccggagtgaaggcccacactctccttttagttctcttttttttctccattattggcatgattttgacagtctctaggtgaatgcctataaggacaaaggaaataaatttaaaatgtgaatgcaatagggaaaatgcaatttttacaggcgtctctgagagttggttttcactttaagacctggcagtggcagtaaaagtgcacaccttgtttgaaaggtgcagtgccagtgggagaggctgggagtggaccagacatctatgaaatccacactgttgtagaaacctgtaaacccggtgtggcggcccagtgcagagacttaggatacaaagagagaggaacttaagttatgttgtggaaatgtgacttcttaataccgttcagaaaataggtacagaggcaacagtcccaatcttctgctagaaatttcactcggctaaaagcagaacgtttaaatacactcttgccatgggctgctgagaggtccagctctcaagaagtgggagcagctctagggatggccacgctgggctcacttccgagaaagaggaagagttagttggggtgaggaaatcatggaggagaaagaccagtcatttcggggctcctcgtcctgaaagcagagactgccgtacagaactcagcccacggaggtcagccacagacacctcaggaagcacaaagaagagaacgatcttgtgattccaggagagtctctgaaaagaaggtagttcaagaagagtagaacaagcaggggcttgcagagaatgagaataccacatgggcctctgcggtgaatttaaggcaagaaggagaatgaggaagcaacagcccctgcctgtgagtggcctacaggctagaaacagaacagcagacgctgccacaaaggaattgacccaatgcatttacaaagcattccagtctttcttgtccagctttatcccaagtagtggaagaacctcctgatactttcttaaagcttctgacagtgatctctgtgaaattatggagcgtgtgtaggggccagagaagcgaaacattttgattttctacagctaggaggctgtaggagagtaagctcgatgttaattcctggaagactcttagggtatattctttaaacaatagtgtgtgtgctttcaaaagaaatcggtaattttaggaacatggcaaattaactgaactttcttttattgtaggtctactaggtttagatcaaaagaataccgaagatagtgttgattttattaaggcactgaggggcatctatcatgatttcttttgaaaaatatggagaaatatgttaataattgttaggccaacactggcccaaaaatgcagattaacagattgatgtcagtttggagggaggacttcagttcattgtcatggggctcaggcctagtcagcatgtctaccactggccttcatgaaattgcaaaatagaaacttaacgaatttgttgaagacacaaagttgggagagatgactaatgccatataaataatgcatagaaaacaatatttttaaaatccatgctggtttttaatttaacatgacaggagaccaaatatgcttgatatacttcctaagaacatataaataaagtaccataaatatgccaacaagtttgaaacttccaatcacattgtaaatcaaggggcgctaaagagcaagtggaattcctaccagtgggaatgggtgaattgagaggcatttttctggcctgcactccacgtgtctatccactgacagacccaaagagctggattgttgaataagatgtgattcaggcagaaaaatatgaagacatatgaaaatatgcaaggtctcagaaaataaagcatacatgtcctcctccagagacaatgaatcaattaatttttaatgttccaagtgattgagatgaatgaaaatccaggaccccagcatagtataaaatggaccaatggtgaattgaaaccaattaaatagagctgaggcatcctgagcaagagcacaagctctgggagctgcaaatgagcctcacccctgccacttactaattgtgggactgtgcgagagttatttaacctttctgaacttcactgaacaggtgtgatttctgtgaggattaaatagaaaatgtaggtaaagtgcccaaaattacaactcttatcaactttattagtattatttataaaaataactatgttaactatagttacaaaataaaaattagaatttagttttaaaaataatattttgagaaataacaatataagaaattgcctatataatacaagactaaattggtaatgacaaggaaatattgggtgctggagggaagcaggtgttacatgtattttaaaacttacttgtgttaatgaagggaaccatgagttaaagttttgttttgaactttgtaaattatagaagtttaatttgcaaatgcttttaatacgtataaaggttaaaaatccgggtttcaactttcaaaaactcaagataaaacaaaagtatactctatgacagcagtccccaacctttttggcagcagggaccatttattagtctgttctcacactgttataaagaactacctgagacttagtaatttatgaagaaaagaggtttaattgactcacagttccacaggctgtacaggaagcatggcctggaagcctcaggaaatttacaatcatggcagaaggcaaaggggaagcaggcatgttttatcacagcaaagcaggggagacagagagagagcgcatgcacaaaggggaaagtgctacacactttcaaacaactagatcttgtgagaactcacttactgtcatgagaacagtaaggggaagtccgccccatgattcagtaatgtcccaccaggcccctccaccgacatgtggggattccaatttgagatgagatttgggtgggtacacagagccaaaccatatcacaccagtctcatggaagataatttttccactgactgaagggatgggggcagggttttgggatgaagctgttccacctcagatcatcaggcattagattctcataaagagcatgcaacctagatctctcacatgcgcagttcacaatagtgctcgagctcttatgagaatctaatgctgagaggaggcagaactcagggagtcatgcttgctcacctgtagctcacctgctgcacagccggttcctaacaggtcatggaccggtaccggtccgccattgtggggactggggactcctgctctatgaaacaaaaaatgagaaagtaaacacacagatatccagaagcataaaacaaaatgacagaagtagggttgaacgtttaactatgctaaaatatgtaagtgggttaaacactcttattattaaaagtataagacttacagatgttggttaaaacagaaaatgtatccatattctgtacaggagacactaaaacaaagtgttgcaaaaaggctaaaagtttaattaattaattaggaaacagtatcagaatagatttacaatataaagcagctggtgctataaaatacaaaatttaattaatttacctctggaaatttagaaataaaaaagagcaaaaattaataaggaaacataatagcataagagaatgaatgctattcatagtggtatgctaagaaatttgaaaatcttaattgtaactttctagaaaaatataaatttcaactttagataatttttttcaaaatacagaagaacattaaagttaaaaatttatttaataaaattagcattatcttgacaaagatgtcaccaaaaaagtcttagaataatcttatatatgtacacagatgaaaaaagaaaaatgaaataaaattgaatccattggattcacagttaggtaagacacagccaatgaattcaaggactattcaatgctgggaaatttaatactataatatatcacattggtaagtcaactaaaaaatgcagcatgcaataaaactcaatatccattttaaatacaactcttaaaatactaggaatagaatgacagctaatatgataaagaatgtatctcaaactaacagcaaacatttagtgatgatgtcctggaagcatttcctttaaaatcaagaacaagaaaggaacgtgcactagaaccattgccagtcagcgttgtgaaaggtcgaggggctacaacaaagcaggacgtggaaaggaagagagaaaattatcaatatttgcaaatggtgtgattatagtcctagaaaatctaactgaaaatagttagcattaataaaagggccccagaaacgtgactggatatgacataaatagtttaataatcagtagtttttatgtaccaaaaatgaccatctggaaaataaaatggaaaagaattcctatttacaacaattacaaaacttttaaaatgtgcttagggaaaatattctaaacacatgggactgtatgacaaaattaaatttaactaaaagatatagaagaacagttagaataaatgaaagcatgtcgtatttctataggaaagattgaatatctgaagatgccaaatctttccaaattaattcatgagtttaagaagaaccctaatcaacagcccagggtgtattttctttgtttatattttggtttgggcattgtttgttgttttggtggggagtggaaaggagagtgcttagaaaaataattctagaatttatctggaaaaataaccagaccaaatttaccaagaaagatatgtcatgagcacagtgaggaaaggataagagacggcattcctacagatgaacagaatggtgcgggtaaaggaatccacggacagagctgtgtgaaacaaacaaccaggaaacagcctctagtaatgatatttgttggggcataaaataaaatttttaaaaataaatgtgtccaaaataaccttgtattcaacagcaccattttaaaagtagaaggccagagccataaaataatgcatcagtcaaaggcagaagaaaatttgcatcctcctatgtgtctccaaagtagcatatactgtgtactagaaaacaaaatctgttttcccttacaaaaccagtttaaaattcccctcaatttatgtatggtaaaaataactttaaggtgcttctctaaaaaatgaaactaatatgcagtgcatctgtggctcatgagaacctactatatggtaaaggaagcaaagaagttttaaggaaggtgggcgagggcagggactggattggtaagtatttggaaataaaataactttacatacctttttttttttttgagacaaagtctcgctctgttgcccaggctggagtgcagtggcgcaatcttggctcactgcatcccccacctcccgggttcaagcgattctcctacctcagccttccgagttgctgggattacaggcacatgccactgcaaccagctaattttttttttgtatttttagtagagtcagggtttcaccatgttggccaggctggtcttgaactcctgacctcaggtgatcctcccgccttggcctcccaaagtgctgggattacaggtgtgagccaccacgcccagcctacatacctatcttatacatttagacaaagcaaattacaggtggattcaaatagttaaatgaaagaaaataaaccataagacttgggggaaaaagactatttaactgcctccagaattatggaagactttataaacatgaaagtaatggaggaaggcacaaaagaaaagactgagattcaactcataaaaatagaaaacttttacccacagaaaaattacagaaaattttggaaggcaaacacacactgggaaaatgtttattaaagtggtagacacggggtcaatattgctgctgtataaggagatcttagaaatcaattaaagaaacacatccccattagaaaatttggcaaaggacgtgaacagatttattcacaaaatataaactacaaactggtaaatacattttgatttttaaaatcagcctcactagtaaaatagaaacataaattaaaagaagatgctatttttcacttaataaagtaacacagattaaaaaaatacattagcaataggtgtggtaaaatgggctctcatatactatgatagaaatagaaaaaagttataacctttctggaaacaatttagcaatgcatatcaaggtctttgaaatgttcataccctattaccactaattttccatctaggaatttgggctgaaaaataattagacaaagttttatatttacgtataatgatgttcatttcagctcatgtataacagcaagaaaagaggagagaacctaacatcaaaggggaatgtttaaatgtgttataactcatatgatgagctaataaaacttatgtttttgaagccaacaagttgaaatgctcatttcacattaatagcaggatataaaatatatggacagcatatgaatttgaataaagtttaaaaggaaaataaatatgcatagtatcacatttttgtacagtataaaaataaattcaatagtatcttaataaaaattctgggccaaaactaatgagataaatttagtattagaaatgctaagttatgggctcagcctcaaaaaataggaatgaaagaggactaacttaactattgcatttatgaaaaggatcggggggatttcactgccccaggcttggtgttgtgattgtagtcgaagctgacctgggttgccttggtggcagtctgcggtgtccaggtggggagggggcagtccctatgctctgtacagtcaggctcgtctgctctccaagtttaaagagaagcaaggtgtgtcctcctctcatgttggtcacattcagtgagggaccccaggggaaccatctggaaactgttacataaggaactgcagaaggatctagggatgttttacctggaaacaaggatatttaggggcaatggaatagctgatttcacatacataaagggctacatgaggctgaaaaatcagactaattctgagtagcttcaggaagcagaactagattttgggtaggagtgaaagggagaggcaggttttagagccatgtaaggtgtagtcaggtgttcatcttgcaaaatggtgagctcaccaggacacaaagcatccttgaggagtgaagatgagaggcttcatcgggcagaagttggaatagaaggcatcaaaagacccagccgtaggatttctgcagtcccatcattgactgactggaggcccaggtgggcagaaagaaggcgttgaaggggcatagactcctttggccattggttttcaacctttgctttacaacacaagcacctgaggagcttgttaaaacagtgctggaccccacctccatagtttctgattccgcaggtctcaggtgaggacctgagaatttgcatttctgacaagctctcaagtgatgttgctgctgctaccactggtgctccaggaatcacactttgagaaccatctccttaggtcaagagcaagaaataaggagatattcttaagcccgatggtacagagacctagaaaaaaaatatggcacacaggaagcaagcacatactaaatgacatatggcttttttttttttttttttttttaatctcggactcttggacaatagtgttgaaacttgtggaattaaatcacagactggaggccgttctttccagatccacatttctacctggatgatgggctctgtcaccaggccaaagaaattgatgttgagtattaaaagcctctaaggggagcggatgctgcaattttcttccttcccctcttagatgttcctagatggtggggaagttcattgtcacttagaaattcatgaaggaaatagaatattgctcatggacttcagaatggcccataattagctcttttgggttttgttttgttggttggttgtttatcatttgttgttttactggaccttggaaggagtcttcctcagtgaaacccctcgttataagaacagatagtatatgatgtagacaaccacagatgggacccccaagtttgatgatgtcctcagtgtcctgcagttattccaacaaagatgcacaattcccgtcgtcatctccattcaaagtaaggctcatttatttgagctttcagctgattggtttaggaagagaactgtgtacagcctcccccacatctccccaccccttgctgctctcttcctgagctcactatgtcagtgtgagcagactgtgcgcctaacacaccggagtctgttgccatgacgctggggagaaatctggttcctatagcaacatcaggttgactcgttgcaccttatgacacaggcagatctccagcaggggcttctttgatctccagttaatccaggagagatggacacatgtagtactggaaaatattacattttcccacaacccacctaatcctgcctgcctgcctttcatcctccacattaccaaaataataataataaataaatccgcattccctttttttttttggcaacctgaaaaaataaagcaatggatcactttaatgttctcagcagattaaaacatagtttgagggtcaatccctatcgcctccctttccaaggcccatccatccgttagcctgccccctggcatgttccttgaggcctgtccatctggcctggctggctggtgagaagtcctgtcagcctcaggggtccggggacatgccagtagtgcaatggcagctccctgggcaggcctaagaggccaggggctcgttagcaatggtagcagatggatgcgggggcagccccaggagaggccagcaagtccggtgccgagaagctccttgactcaccatccaaaggaatgcacggtgttggcttctgtatgtcacaaagtgggcagccagcctggggcactcggcacattcctggtctggtctgtggcgggagaagtgacaaggaactggatcgttactgacaggaaagcatctcgttgttctttaaagagactttcagcgaaggaggatccatgattttccccaacccttcatttgagtgcctttcagccttccttggggaaaacatccatatgttttctacttatattacttacttgtcacccctcattcattcagcaaatgctcactgagcttctccatgtggcaggctccgttctagaccctgagcactgaataacacgaacggggtttctcctctcctggcacctacattctcatgggggagacagataataagtaaagaaaatgtcaggaacatgaatatacaatggggagttttgggggaggctgcaaagtgagtggtcggcagaggtctcctgaggtgacactgaggcccgactgccctgaggagcctgccctgggacaagctagagagagggtgtcccaggcagcatgcagaggccagcatggagcgctctgaactgggcagagcaatggggcaggagtttggcgtggattcaggggccgcagctgtagggcttgtgagccaggggagagattggattttaagtgatagatatgggaaccattgaaagtatttcagaagggaaacaacagaattatattcgtatttatgagtttgctccagctgccttaacaaaccctcttcaagcccattttccttttgcctttccattagtggcgattaaaaaaagatatttgccacccttcttaggcttgaaggtgatctgcaagtcaaacctcatgcttttctccagtatcagtaagctcagtcccatttttcctctcttgtgcatgacgaactttgttatgccagccttcaagggatattccgaattcctttttcttagaattctagagccagcgggggccttacagatcactgggtccagtccttattttacagatgaggaaacttggttgccacagtggtcaagggacctggcccacatcacaactccgctagccagggctgggcctctggtgctagaacccagcaccctcttccgccccacaactagtagacagtagactagtagtcttcccacgtgcacgtttacttaccagtgctcattatttcttctcttccttttctgattcatctctctgccttcctctggtcctgtcattcttccctggtatgctggaattttttagtaatggactgttgattgcagtatgtgggaaatttggccataagttttggttctatgtggttttttattgtggtggcaattgtttttgccattttctgctttggtgttatttgtggctcccattggggcctccctaagccctgcttattttcccatgactggggactgggtgttattgttcgtaactcaatattccagccatggcattcaaggccaccaaccctctgcctgtctcaatagcatatcacagcccacgccacattggccttccgtgggccaggcctcagggtgggaactcagccagggtggttttcctactctgaggcattggtagagcggtcagggctccctgctggcttacacccacatagcagctcctaactccacagtttgtcttcccctcttctgtccactccagctcagggccccttagccattcactcagcagacaaagaatactaatagtaggtgataaccactgctgcagggatgacacattagcattaggtgacaaataaaccatctccagtcaacattatccctgctgcatccaaccagcacagccgggaaagcaaacaatgaggcagaagcgcgtttcctcactctgaaaggcatgcatgcactggaagttgggttcattggagagcagggtggcttcacatcgggatctgtggcaggacagcctcagagcttggcagtgttgtctgggaactgggcaatatcaataataaggtgcttccagtgacagtctacgtcttcatctttacaaaagctttcagagataagattattgctccagttttcagatggggaacaaaatgagacaggattagtgattctttcaaggtcagcaggctggggaaagtcagggttggaacatgaacccagtgcagggcgcacttctcacacactgcccttctctctgggcagcagatgtgcatgtgctgagcggctgccaaggagacaggatggttgagactctgcagaagaagggctggcatcttccctgtgctgcctcagtgggacaggttgggctgagatctgcaaggtacaagcagggcttgcttggggttctgatgagaatgatgcccagtgaatgatgcccggtgtcgtggctcagcagaacaggcctggcatgaggctcaggagatgcgtttcctgggtctggcccaccttcggctcctgtggcactgggagtactcttaagtcttagctctctgaacaccaagtgaaggagttagcctggaggtccccaacgttacactcactgataccattctatgatttacaaagctcttccttgatgatcagatgtttcttttccgaggtatttcaacttcccatttatagttagtattgaagtgccacctgtgggttttccaggccgctgtctcttttctttatacatcataccctaaggatgcttattattgctgctgttgttaaatcaagtccttgtcttagtatatgtatcttaacatattgagttagagacagtgcctaacttgacaattctgacagtgttgatataatccatggagagtctttagcccactggttctgcccagagctcactggtaactcaggctctctgcatggcaaagtggaagacgttgaccacaccacttgattgggagctgtcttccttccctgggatgaaaccagtcaggaccttctcacatgggaggagtatcaaagactaaaccaacctagaaacagtccaagaagaaccaaacaacgaagcaagcaaatcaaaacaggggaagaggacaagcagggccccaggcagtttggctggtgcccagcacagggcctggcactaacaagtgtttgagaaacattgagtgaaatgacatggttgctcagtagaaggagcagccatgctcaaggccagagtcgccccttcagtctcagccattgcttggggaagtggtctgtttttgccattagagaacacactgccatggaggacactctagatcagaagtccaggtcggagtcatggctttgtgacctcctgtgtggctttgggcaagccactaaactctgagcctctgtatgtgaggacaagcgcccattcttcttcttattgcagagtcctcataaactacaactggatgatgccccctgagtacctgtgcttgaggaggggggcaaatagcaccgagatggtgtcttacccacctttgtatccccagcatgtggcacagagccctcactcattaggttctcagcaaagatgagtgggtgttcggatggatgcacagcttaggcggacaggtggacgaataaatgtgcaaggaaggttctgggagctgctggcggcaaactttgcttgcttcccaaggattgtcctacctttctgtaataggctagggggctgtgagctgcagtatatttctgctcacaggagccctttcccttggggagctatgtggagggcaagaccaccccaagaaccccaacatgaaaccttaactgggattctgctgctctaggctaagcaatcctacattcttgactagaagagtgtgtcttaggcatacattgctgcacagaaaaccccccacctcctccctgcttcacagagatggggtgaaagatggtggtgccctaagaatgcagaacccctgcgccacacaaagcatgctcgctacgcccactagctggccaggaatggtaggaatcgcagggaccatgatcaggccttttctgctggggccacctgctgctgctgttgtcacgttctgtgctctgccgccatcctctgcgggggtggagccagcatcttggcagccccagggtaataattaggggaggggcagctccccagctggcgtggtatttgaggaggggcctggaggagaaggaagggctgggacacggccaacaaaaggagaaattaaatgggctgtcctgggagcccatagttagcatttaaacaccagcatgagctgtgggtttcactgagcagggctgtgtgtggcctcaatgccctcctctcccggcccccgttctgtttgtgagcacaagctgggaggactctcagcagagccctaagaggtgatgttgtcatgccgaagcccaggattcaggggctttcatgcagtgcaaggacaaacatggcgaacaccacatgcacccagctgcaacagcgctgcacccctgacctactcacagccctcaaggaactcaccgaccagcctagccttacagcggctatcacaggtgtgctgggcccctgacgtcgagggatttagggttttgttttatttgctgtcagcatggttcgcgttgcaatttcgattgtgggaagacagccaggaaatactaaagaaacaccccatacctccttcaccacagccacaggtactgagcattgagcacacgttatatgttctttatctcctccagtctgcactgctcacttaaaaggtggggcgtattatccccgtttcacagctgagtaaagtgaggttcacaagaatgttgtggctggcccaagttcacacagctaatgaggaggggaaaggatgccaagtgagtccgcctggctcctggagctccttctgcttctccatgatttctgaagaacacacgaggcctccctgtgtcctgtgggagaattcactgtctctactacgtgggaaaatgtgaaagaaggtaggcctgagtgctcccgtaagctttggggaatgagagctgagtgaattggccttactaagtgatctggcagtaatctggtggtcttgagcctagaagagggttggggtgagtgtgaagagtatgatcccccgcagagccgagtcatgacttctcttctgccaggagctcactggactcccatacccttctttggactttagtttcttccagtaataatgattataaagtctagaaataatacgattaacaaccacaactgagtaaatacttgggaattagtgaagtgctaggtcttgtgagcagattctagaggtagaaacagccccagaaacacaagctagaaaaagaggaacagcttccaggagagttccaggcatcctaagggaagcacgggcctctgcatgtggatgggttcgaatgccagattccagcacccctctatggcctctgcaatctgcagtcttttaaaactgtttttacattagaacatcacagggttggactgtgccgccacaaaagcgcctgtcttcattacccatgattcctcaaatcatcaaacgtaagcacatagatgccaaccagtgtctacggggtgtaccaagcacaggcccatgggagccatctaccctgtgcgggcaagaggggagcagttgtctatgggaaatttaaaaacaatcataaaattcacagaaagatggtctactttgtattgtcatcatggcctggccattctaaataaggtcggggataaaatactccccgtgggggaagagtgttccctcaccacttcacaggctactaaatcttcattgctctcggccattgcttggttgtccttgttctttttgtttgtttatttgggtccttccttccttccttccttccttccttccttccttcctctctctctttccttctttttttctttccttttcttttctttcctttctttgccaataggccaccgtagtcagtttcatgtgtcttcctggtcaatcccatgtttactgcacaaatttaggtttcttttttgtggtcgcatttaggaaactacctagagaatagtgagaaaccacaggagggaaggagaacagcgagaaaaatactgttttctttttgttgtttactcataaatgtcacagaaatatttcagttcctttttggttttgataagtgcttttttaaaccaagtcctaaatcaagggcctctcttggcaatgtccctttgacagaaccgagggagggtggcagggcagggaggcacaagctgcagaggcacttgtactgtacaattttctgggtcctgactgataaattattgtgcatcttgtgcgtgctctgacatgcagtacaatttgtccatgtaacggtgatgataggctgtcccgggctaataatcatgaaccctttatttagctccttcagccttttagagaaatcttaagtaaccgttcatatccctttatcggttttctcttccacattttagcataagtggaaaaagcttttaaccctgagaattttactcaccctggggctggggacaaggaagaaggcacgttgttaaaagtgtacaggaattggaggatcttgacgctcccgatagaacagctttttcttggtctgcctcctaggagtgtgaggctgtctgggtggtagagattgtccagtccatctctcattttactggtgaggaagggatgcaagccctgagacgtaagtaactggcccatggtcacatggcacagtcatctggaagtgacattgagcttccttcacccattacagagagcctgccatgatgcgggacataataatataaataaagacatggccgggcgcggtggctcacgcctgtaatcccagcactttgggaggccgaggcgggcggatcacgaggtcaggagatcgagaccatcccggctaaaacggtgaaaccccgtctctactaaaaatacaaaaaattagccgggcgtagtggcgggcgcctgtagtcccagctacttgggaggctgaggcaggagaatggcgtgaacccgggaggcggagcttgcagtgagccgagatcccgccactgcactccagcctgggcgacagagcgagactccgtctcaaaaaaaaaaaaaagacataatattaccagctctcctttggcacaggtcccctggttcccatccccacccacgtgatggtcaagtcagcttaagcacgtgttcaacactctgcccaagtggctgggtgtcccttgtatccttttctgtgtccaagttattgatggtagattgtgttctctggaagacagatgtcgtcctggtgtgaattgtttcctgtagcatctgtgtagtctaaccctaacttgcatggtgcttgcatggctatttttggacttggctttgcaagctttaacacgtgacgctgcctgtttctttacaggcacaatcttgcaattgaggtgactaaaaagcagtacctggacaatggtattaggattcaaatatagcttctaaaagattggaacgatagcaagagggcatgcaggcattccatctgtgtgtttaggtggtagcaaggagcattcagttgctctctgtctgcagctgatgtttttcacccctctgggagcccggtactgacctcttctgataaactgggctcttaataggttggttagattcccagtgttcccccatccctctttcatcacatacacaaggggtttgtccaagtgagtatcacaaaggttgttcttggcttaaggctggcacgaaagggctctgccagtgagcaatgttagaattaaagacacaataatactaattaacttccccatgcctgtgatctctgcatttattatttgtgtagagataaagccttaaataacatgactggcctctttgggggccctgcttgggagtgggtggggggcaatgtcctcattacagcacgtaagatggatggtgtcctaaggcagaggcacatcaccaaggatcacctacggaaggtgcaacctccttcccagctggcccgtgtgctttttcccagcagcacgtgggatggggagggggactgaggtgtgtgaaagaagagaagcaatttccagggatgtggccctttgcaaggtctccacgtccatggccatctgccttccaggacctgctgtgaactgtgcagcagacacactcaagctggctgcctgtggttgtgggaagtccctcactcctctgtcctcagttttgtcatctctgaatggaggaagggaggttagatcaggcttccaagagtccttgaagttcctgaaattatatataaaatgtgaatgtgtgtcaggcatttgtcaggagctaaaaggccattgcctgtgattctcagaggtccctgaaccaaaggctaagggccaccaagtgagatgctccccaaggatccatcttcctcttcccgattatgattttagaacttccaaacctaacgtgtgttgtcagctcagacaaactcagcattcaggttgtagagacagatgatggatactcggtcagaaatgccctataaattagctgctttaaaagtattgaccaagtagccttccaggaaagttccccagatatggtggttctggtgttcccacctcatctgcaacagccctgggaagcctggctccttgcctccaggttttcctcgatgtaaggccctccaccccaggacactgtagcaatcctggggctaaccctgaagaccatttccactattgggcagccttggtggtttccttgtcgtagagaactaacccagtttccccagactggctaccttctcatcatctcaccatctctagctttcactcagatagaatgatctcagagcaatcggcagcatttctcatttggaattttactaacaaattaataataatgactttgactatggggatgcttaagaaaatctcccagtccttggaggtatcctgggagaagatagaaacaactctgagaatcagaacatctgggaggattctgcagatggatcccagggacagcccaacaatcagagggccctccttcaaagcaagtgctgcctccagcctggggcagacccatccctctctgtgtcatttgttttcccaaacattcccttcttaaactggggttcatgaagtctatagatggaattccagagggtttatgaacttggagaataactggatctttattatcacaggcttctagccgaaatttctcacggtattccttcgcaagtatagacaacacaccacaatagcattagcagtttctgttactttgtccaccattagaaaccatggatattttcttatcacgttaagatggttgcaaatatctcaaaaatattgtttgctttcaatactacttcaaaattctggtaatccactagattttgttatttaacatattatcaaagaagcatgcatatttgtgtattacaaaattgtctttaaatatttttgatatctatatttcaacataactggctttatttgcaatcctttatttccatttaagaacattattctgagaaggacctacagccatcatgagaaccaccaaaggcagccacagcacaagaagcttacagacttctctaaattggcaattcacatttcaatcctgtgctgcttgtgtctgaatcatatcatagggggagctctgagcttatgtgaacatcgaggctgtgagagacagaaaggagagatgtaggagccaaccttgtgtgtgctgagattcgaaaccagtcatatatcccataagcaaatgttcctgaactggcaaatcccagaatgtattttgccctgggcaccctttacctcctcattaaataagaaaataacccatgagtatttgaaaggaacttgcatcgatgtggaactgactgacttagaatagagctcatccgagatcttgagatgggcttattgacacaaccgcctttcagctgttcttgagagtcccacaggatggggaaagccttggtattagtcactgggatcagagctgggaagctgcttagctctgggctcagcaggctggaccaaggccacttgtaggtaagagaggcagtgttccctaatgcactctagatcagctggaactagtttgtaatcctggattcaagtcccagcactatcattaatgaactgtgtgatccaggcaagtggtttatcagccttctcttccataaaatggggtgctgtgctgtgtaggtgtgcctggcttgtaagcactaaacgagtgtagctattactatgatcatatgcaagcagcacctgtagcatttggaaggctcaggaaaagaagggtgggtgggagcaaaggcaaacaagagcagtggagactaaagcgggttgtctcgtggcgatgcttaacctaggggcctggaatttccccctttgcctggtcttactgtcattggaataatcgtaaccactcctgggtggtaagagatcagcaacatagctgtagttcgttgggtggcaggaatgtgccctttgtccttggtttctaagtaatgatgtcttcatgtccggttgagcgaggggtcagcttcaaccctacgataaaccagtggagttataaatggaaagcctgaattcccagacagaggaggcgatccaatgagacagcagagtaagtagggaattttcactgcctcgtctgcaatgataatgtgaatagcaataataatcatcctaagaaaggattttgtctcagagccaaggcaaggaaaagagccttttcccatgccttgctggggagagctgaacactcaaaccacgtcaaaatagaaggaaccaaaaatacagtgaagtaccctttgccccagtgagaagccagtgcaagacaacgccctgcagaatgggccagagggcagaagaagaggccagggcccagtcctgaatttgtctgttggttctcacttcctcctttaatcatttcagaagagctgttaatgagcaggaaatctaattgattagcatttcatcctggcttccctttctgccaaaggtgctaatgagcagggaaatcacagatcctccgggtgcaaggtacttgagaggttgtgaatgcatttgccacccctacatggagaacctcatctgaacctcagcaaactgataaggaccactctgatttttaaaaccctccagacaagctgccttccttctgtggatcacacaccacccaggttagcagcagtgccaccagaaacactgttgcactcaagttttctcgcaggtgactcatctgcatgctccttggcggagaatcgcgggttactgtactgtctttgtgtaagagttcttcatattctcgaagatgtttgttacatcttgtttctactgtctttcctccaggttacacattgtgcgtctttcaccctttctgtgcaagttgttctttctgaccctaatcaccttatgttgttggatcttactccaagttcatctactttggtcgtggattcggaactgagcctagagtccatgaaggactctagcaagaatgagcacaattagaggtctcctggcaccctgttgttgtctcctttttttctttctaacaaaagcccatggtcagtctctccagttcatgactctttttcaaccccagcctccctttctccgtttgtgtacatgccctatttttcttttcctggtagacaaccctgcacttttccttctctgagcagcaacagtgaaagggaagggaggtggagggagagtaagccacatgggcaacctgcaacctgggtctccagcctcttgcagtcttggtcctcaccgtggcatagtatagtaccagtagaggcactgcagggacagatgaactccatagcaaggcattgcaagaggcctttggagaaattcctttgcaatttgagcaaagcccactccttggcttagcaaatctttttactttttggtctgctagaatttactgcatgcgtagttatccagaaggtacgtctctgtcccattcggctttattagacgccatctggaaaggggctgggagtggtcagcctcagggaggggagccaactgaccgtgaaaggagggagatgagagcgaagtaagcatagtgctcgctccccaaggattgaaactgcctgccccgagctgaagacttacaaagacgtagtccagattcccagagaaaatgaggctttatacccataacaagttgtaatttgagtcaccggggaagttaagaaagtgaaaacatgagcaaatgccagtgtgatggaatcagagtctccatgctggaagagacttcagagggatctgcttgagctccctggctttatagacaggaagaccggccccctcagatgcacacagccaggtactgcacggccgggccagaggcttttctgatgcctgcctccctctcccggcaacggaacctcatcacctagttctgataggaaaaaaaaaaaatgaggtgatcagaaaacaacttcctcaactttctcagtctccaccagcaactaaaattgttcctgtatccccctcaccttatccacttagcacccctacacccaagggcagctaggacccgctgctgtctctccatgacctccctccctctgtagccttaggtaggcccctggcagcttttgcctggaaatttgcaacagtctcttgacgggtccccctgcctccctccattcttagttcacctgtcactctgtggctgcctcacccatctaagaagcaaacctggtaaaattgcttctgtttaaaagtcttgaaatcctgcaatggcctcagtggcccctaggataactataaactccttaacatgggctacaaataggtggttttcacccctgggtgtatattagaatcacctgggatctttttaaaattacccgtgcctgggtctcacccgtagtgactccatagagtgggcctgggtggggccagtggtgtcctacagctggaaccagccccagcgactcaggagaggccatcgcttccaggaatcttatgagtgggttgttaaatgaccattattaaaaattatacaaacttgtaagtaagtacattatgttaaaaacaaaggtaatacatactcaaaagtcaggtttgcctgatgcctttactacctttcgaggtaatttctattgattgtatctgctgggtggaaatactatataatggtgtgctactacacatctcctcccaactctgcagtcagtgacatcccattggtagcttgaaattgaccatggcatgagtatttacatcatagaaattggcaaatgctacaaatcagcccctgccccccaacaagtcattaaacactgatatcactggctgcggctcaggtatttacatgatttttttaaagctcctccggttgattctgatgagcagcagagttgagaagcaccagccaggatctgactctttctgcctcttgagcaagcctcatctcttagaaaaactctcctcttccccccaactttcttcagtcctgccacacacaaccaactgcagtggcccaaacacgagtgccatgttatttctcattctgtgtttttactcctagacacactgattcttctgcctggaatgcctgtcacttccttgtctgcctggcaagcacctgttcatcttccaaaactcagctcagtactttgtcctgtgtgagctcttcctatacctcctccccacacaggttcaccactctgcctctgtgacctgtatgtcttctcattaaagggcttttagaattttatggtgctttctgattatgtgtctctatctccacccccattagacactaagcacccgagggcaagggcgtgccctgtttctctgcatcccagcagggagtgcagcaccagcatagtagatgctcagtccgtgtttactggatggataaatgagctaaaccaggtttcctgactcctggggcagccttcttgccaccccagtcctccacctgacccagcctttctaaaggcaggaagagtaaattactgccattcctgtgatggaccacattctgagcttgctgctgctagacgtggtgtgaagatggttctcacagctcttttaacaataagactttttaaactgactttagttattccaggtttagaattctgtccattcattattcattcaataacatgccaacattattccaggcctagagatgcagtggtgtgcaaggcaggggagggcactttcttcagagcactttcagttaggaggtgactcagatgattaaagaagcaatgactggccgggtgcagtggctcatgcctgtaatctcagcactttaggaggccaaggtgggtgcatcatttgaggtcaggagttcgagaccagcctggccaacttgctgaaatctcggctctactgaaaatacaaaaattagtcaggcgtggtggcaggcgcctgtaatcccagccatccaggaggctgacacaggagaatcgcttgaaaccgggaggcaggggttgcagtgagccgagattgcaccacggcactccagcctgggcgacagatcaagactccatctcaaaaagaaagaaagaaagaaagaaagcaatgactaataagtgaactaagagcgaaagaaagaaagaaagaaagaaagcaatgactaataatgaactaagagctatagcatagaaaatgctaggttccatccagggttagctcctagtctgtggggtttcatgaaggctccccagagtaggtggagccaagggctgacacctgaggcaaagaggaaggtggaaagctgttccctgcaactggaagatcctgtgaaagggctccagggccagagagagctcagcagctgcaaggaacagaaagaagttgccacaaagcctgtgaggagtgacagcagaggggcgagggcaggaggggctttggaagccattttcaggagtctggattctatcctaggagcagtgaaaccccactgaggcataaaaccagggagcccccttaccagatctgtactaagagaacttgcccagatcagtggcccaggagagatgaaactagagagcaggagaccaagccttgagtagggaagaggctgctgcaatggatagaagggaggggtttcagaagcagaatcatgtctcacttatatgtggaatctaaagaaatgaaactcatagaagcagagagtagaaaggtagttgccaggggctggggggctggggaaaatggatttgggtcaaagtatacagagtttctgttgtaaaatgagtaagttctagaaaacaaatgtgcagcatggtaactataattaataaaaatatacacttgaaatttgctcaggaagtaggtcttatgtgttcccaccacatacacacacaatttgctatgtgtggtgggcacatgtaagactatggtgactatgaggtgatggattagttgatcaccttggttgtggtaagcacttcatagtgtataccaatgtcaatcttacatctcaataatatgcagttgttatttgtcaattataccttaataaagctggggaaaaataagagcagaatcatggaacatcatgactggatttgatgatggaggtgagggaagtatgaagaatctgagagaggtagggagagctgatcagttcatggttcatgttgggtttgtggagtttgcagtgcctatgacgtatccaagtgtagttgatcagttcatggtccatgttgggtttgtggagttggcagtgtctgtgacatgtctaagtgcagttgatcagttcgtggttcatctttgggtttgtggagttgacagtgcctatgacatatccaagtgcagttgaccagttcatggttcatctttgggcttgtggagttggcagtgtctgtggcacatccaagtgcagttgatcagttcatggtccatgttgggtttgtggagttggcagtgtctatgacatatccgagtgcagttgtctaggagtcacttagaaattcagttctggaaatttgaggagagatgtgggagagaaatgtagattggggtcatcagtgtatgataactgaaactataggagcaagggtcattcattgtctaggaagaatgactagggtaggaggagaataggacatcacatttaatcaatgaccagcgtagacagagctagtagcagcaatgagatgagtgactagagaggtagagagaaaaccaggaaagtgtggagtcatggaagctaaggaagatggtgttgggaatagaggtggtgaacagagtcccctgttcttgctgataggagaggtcaaatgagataaggacagaggcgtggcctttggattccgagatgtgttgatcaccggtgcacttggcaagcatgccagaggagtgctgaggcagaggtcagagcacactgtgccaagcagtgggaggcaagtgatggagacaagcgtctgaactctaggacactgtgctgggaaggagaggggtgaaagaggacagttttgggatcaagggatatcttctatttttgttgtcatttgttttgaagtaggagaggcaagctggctaaactttaagtaaaagggaagattgtgatcctgtcctctgtgagtgaaagagagcatccttttaatgtgatcagtgccagatgtcatcttacaagccctgtgtctaacctgataggcatttagagtggccaaggcttcctggactggcctcatttcattgatgactgcttttgcagagactccattgcctcctaattgtctacacttggggcctccatttttctcttccttggcagaattttagaagaagcctcctgtcaccagcctttcggagtccccactgatactggtgtgtgtgctcctgctgtggtgctgcccacccaccctcgttcttccaaccctccggcaccgaatccctcctttcactccctctgtcccctgggcaagttccagctggttacagtgaattcccgtatttccctcctctcttacttctcatttgtcagagtgcacaggaggctgcctggaatgccctctactcccaggctgaggaaattaaagtagctaaatttttattatagcatctctcaagaatatttctagaaatcatagagtcgttgcaccttactactgaatagaagttgaggggttatttgacccattccctttaattctaggcagcttgatttccaaactctttgtaggtacgtcttctttaagatttctatataaaaggtcccccaagcccagcccttatgactagggcgaccatgtaattttgcattcaaacagagatgccaaagggggccctgaccaaacaggacttgggaacccaggtatgatctttgggaacaccagaacaacaaccagtgtaaatgaggactgtcctgggctagccaggacatgcagtcatcctgcctgtgatgagtaatgggggacagaacccgagagactcttttttggctagtgcttaacattacgggacagtcactgagcatttactatggattaggcattgttccagacactagaaccgacaacaagatataatccttgccttaaaaaactgttggggaagaaagacacaaataaaatttgccataattctgtgtgataagttttgatttcagttttggtaagtaatagctttatggacgaagtgctttgggaaaaaagcagaagagggatgagtttggaggggttcgagaatcagaggaggtgacaggagagctgggctttgaagatgatcaggatttcttggggaatagggctgcaggagagggaatgtgtgccaagagtgtggaacgaaggcacggtgggtaaaagagagagcaagagctaaagctgagaactggacagggccctgacaggacccattcaccttctggaggcatcattcattctgtgcatttgtgatctctttttgcgtgagtgcaaggtctgaagtggcctgtggcatgctggagcttagtagacacatctggtgaaggtgtggagaaggccagagtaggaaaccactagaagtggagaggtcacctcagagactctccacacagcagtggtggtgtgttgcttctgaaccaaggcagggtcagagaggacagaggaagaggcaaccctaagagagcatttggcagctgagacgataggacgcagtgactgacgtggaaggtgaggaacgcaaaaatgccaagatcacacaagcctgcttcagaagaccaagaagatggggtttcccttcattgagacagggagcaggagagcagctaagtctgacgtcaccaaaggccatttggggcatgtttgggtgtttgtggtgcatccacacggacacgtccattaggagtttgtatctatgggtctggggctcgagggacagattcatgtcagaaatactgactcctcggtgcactgatagaagatgtgattgtagatgagatgactcagagagcaagtgtggagcgagaggacttgggaacccagggttgatttttgggcaacgtctaaccccaaagaaagggcaaccacgaaaggctgttcagaagcagcagtcagcagggtgggagggaaccaagaacaggactgtcagggaagcccggaaggaagcagggtcaagctgggaatgctggatgagcagttttcttgaagttacgggcaggagccatgacagtgggcgggaggcagagaggaggaaacaaggtgtagcctactccttctgagtgcttgaagtggggcaaagacaaggtgtgaagatggagggtgagctggggtttaattgaaagtatttcttttcaggttaatggagttttaaggaagtccctttttacagtgacttctgaaagaacacccactctgtttgccctctagacctgggctatcgaatccactagccactaaccaagtgtggctatttaaatttaaattaattaaaataaataaaatgtaaagttcagttcctcagtggcactggctgtgtatcaggtgctcagctgccacgtggctggtggccaccatgctgcacagcaccggcacagagcgttcccgtgtttgccaggagttccgctggacagccttgttttaaactctgcgtttcaccatcttcctaattctgccttttggaacttagtagagtatataagcccaatctgcttatctagtttccaaacctagttctgaggtgaagaaaaccagatggtatttttatcatataagctgaagaattcttacaattttcaagtcagcattttttccaggcattgaccgataataaattgctccatgttgttaaacataagagagagaaatgtaaacgtgagaattatttctactgagccatctatttagtctttccactgctaccatcataaccacttccatctgatcattagcttttgtgcatctacagtaacttcatttttctatttttttgaaagttatgagctcgttagggaaatttagcaccatagccccttccttccaggaagctgcagaggccctgctatagctttcacctgtctgggcacctaagcagaccttgtcagctgctgggaagaaaaagcatctgatttgccagcccctcgcatgcatccatcagccgggggtgggtttctgagaaaccgttgtgtctgggcccaagctcaaagcacacttttcattcctccctgagctattttccttattattctttagaggggatttgtcatggggtgatttggtgtctccaagatacctgggtttaaaaaggtcctttgcattattctgcatacagcgggacctgaacttgggctggaggaatgttgctgatgcccaggtgggaggcagaggattgtacctgagaacttttcctgtggcctttacctgggggaggagagcatgttggcagaatgttctcagggctggccccatcgcacatggatgtgttcatggatgagttcagcagaagtatggcagctagggagcttttctttatgtccatctgggctttgctatttggctgaaattcctggaccaatccttgtgtccgtaagaaccctgtgtccttaccttgtgtagactgttgactactgttaaccctctagtattagcacagcaaagtactgtcgtgcacttcaagcccctgtacaaacacatgcccctcagccagacctcaccctgggagctgctccggagtcaacagcccttgaaagtgcactgtcctgcctcgtagctggaagctaaggctgcagcttcatctcccatggaaacctgggctcactaggaggggcaaggcctccagaccactgtcttaccatagaagccgcctagcaaactgcaaaccaagcagaaaatgcaggctgggctgaggaggcctctaactgatcaccagccaagcagagaaggggtgagtggcatgtgaatgactgctagctctaggcctggaccatggattcaaaccctgctggctggccctccaccatctcctgctccagtgaagactgtggcatccattagtgaggctagagtacacgcttctgactgtggaatccttctcattttctggctctgccatccactagctgtgtaactttgggcaagtgtggcctgacagccgaaagcttacccccactccttgctagctatatagctgagggcaagccatagaacttctccgagcctctgtttctagtctgcaaaagaggataaaaatacttactgtgcaggttgttgcagagatgaaatgatgtttatcaaatgcctaacacaaaggttctgtagatgctgcttctctattctctctggtttaaatccttggcaggtactcgttttcttactaagaaggttataagatcaaaatttcttattttagggaagtaaaactcaggaaagggtttacatctctgaattaggctgaaaagggacactggggattggtcgtggaggctcactcctgtaattccagcactttgggaggctaaggtgggaggatcatgggaggctaggagttcaagaccagcccgggcaacatagccagatcccatctctacatgtctacaaaaattaatataaaaattacctgtgtcatgggcctgtagtcccagctacaggctaaagcaggaggatctcttgagcctaggaggtcgaggctgcagtgagctatgattgtgccactgcactgcagcctgggcaacagagcaagaccctgtctctaaacaaaaaaaaaaaaaaaaggaaaaggagggacactggagaagaagctccacaattttccaaggtgccagggtgaaccagcacgggccaggcggaggcctgtcgtctgcactcccacatggccctcctcctactcctgatgtggcttctctctggtatggacgcaggagctggtccctggcccacaggagaaacttggacacagccatgataaacgcaggctttataatccaagagcttgaaaagataagagtgactaataaataaaaatttctccatttcttcatgcttgattttcaagggaagatgtagaataaatttgagccaccttcccctgcaagtatacctttaaatattaaatattttacttaattataaaatcccctgctgtctggagagaatggccaccttctctccttagtggaaacgatgtcatcgcatttactgagtttgtgaatgtaaagtgttttcagactgtaaaaccctggatggggttctggaaggcctcctctctgggcccatccaaaggggtcttcagaagtgcattggtgacaagaatggcatcaagtaggaagggccccaggtgtagagggatgggcagtggacacctctgtcaggaagagtcttccttatccagggctatcaggatcaggagctagagcccacgtttggagaaaacacaagaagtagtaccaacccagtgagtctcgggtaagaaattggagtggtttggtttcccatctctaacttggccagatgtaccataagctgtatctgcaaagccagtgtaaggctagacttaagttcaattaggatccaaattcttcactgtcaacttgtctaagtttttgtttatttcacttagtttcctagtgaaattttcatttgaaaattcccagccttatttatttatttatttacttattttaatagagacaggatctcactctgttgcccaggctggagtgtagtagcacagtcatagctcactgcagcctcgacctcccaggctcaaatgatttcctgcctcagcctccagagtagctgggactacaggcaggaagcactgtgcctgcactccagccttcttttcttttctctagctttttttttttttttttttaaatatttgagacagagtcttgctttgttgcccaggctgaagtgcaatgacatgatctcagctcattgcaacctccgccttcttggttgaagagattcccctgcctcagcctcccaagtagctggaaacacaggtgtgcaccaccatgctcagctaattcttgtatttttagtaaagatggggttttgccatgttgaccaggctggtctcgaactcctggcctcatgtgatccatccaccttggcctctcaaagtgaccagccttattttaactgaataaagggaaaggggctttttttttcatgaccctgaagacagagggactcagtgcgcccccagtggccagaggctgtagttacagggaaagcaagtcgggtccctctgagcctctggaagagccaagtggctggctgctggaaccatccaggagaaaccagattttccaggctagagctgtttcctttttccagtctgaggcttcccatgtattcctttcaacgcagcacctctatgtgcatccctgaaccctatgatctgagaaaaggtagccgaacccccgactttctcttttgcattgacattagcacagatctgagccacatgagtagttgctcataccattatctgcctttggttgagaaattagaaggtgctaggcacaaacacacgtcatcttatttaatctttacaagccaggatccggtactagggtccccagtgttcagagggattaatttgtcaagatctcacagtgagtagattccagtctacctcactggagcctggtgcccgtccccatggtctgcactcctggtgttgaacctcagcaggggctgtccctggcctgctgaaacagttcagctgaccaggaagtgtgtgtgcgtggtgtcttttgtacagtctcagcccctgggtctgacactctgatggtcttttagggtgctgggttatttcctggggttctatctgtgccaagttgtgtatctttcagtgacacacatctgttcaagccttctgagttggggagcaacagaaagaggtgaagagagaaagcactctgggaaacatggaaatatttttgcagcctgattgtctctgcatgcaacactagcaaagctgtttctgctccctttcggtgtccgagtcaaggggacgaagaggcctgcccaagaagaagagggatgatttttctctttctgtggttgggggcagaaaggcgatccggctgcccaagtggttcaggtcaggcttaactcggtctgtggcctctggcctggggaatgtgctgagctttgattcagctaagcagtggcttgttgcccaggcctgtggtcctccaaaacaccagctgaggatcccaaaacttagggcccttgtgaacagggtgagttgttgtcaccaggacttgccttgtcaccacctattacattttctggggacccagcagcccctggcctatggccacacagcaggcgcctcttggccaagagctctggcatgaagctaggcctctccaactatttaatgtttcattagcggttttctaaaggcatggggccaagcctggccgagccacaccattcagaagtacgtgaacacttcataaaaccaaactgttgaaggatcccaaacccaggaatctggtcacttggagtccaggctggaggcccagggcaggctgctgcactgtctcagctctttcttggtctggatacttctgggccacacatctgtctctcaaactgtttagcctgttagtagttctaaactaacttctaaatagtttatatttggggttcaccaacctgttttcatatctgatgaaagctttggacttgccccagaaagagacatccatgcacatatgtacaacattgtgcttagaattgcaaggtattcacaagccacactctaaagatcatcagtggatccaagtggagaacccctgtgctaaaccacacttgcttccacacttaaactctggggactgtggagtgttatccatcaagaagagtaaacaggtattgggttttgttttgtttggctttttgcttgtgtcttggattttgaatcgaagtccttgagtggtagaatgggggctagatcattagaatcactccagacttcacaggtaagagtgggagctcagttgagtgacaggcccatcccagacacaaagtcactccagggcaattattcagagcccccaggagctttcacgctctaggagcaagtcaggtaagcagcagcaacacacgtgccgcggaggcggcacctacattcagactctcattgctcttgattgactgggtggccctggaccagtccagagtccacggctctggaaatggtaatcaggcttgtggttgcaggggaatttatgtgtaccaagtgactggcacaaaacagaggcccaatacactcaatgctggcagatgatagacacagtggagcagcaaagctggtgaggatggaaacaccccatcacctgtgagtgggattagagcgtctgcagagggcatcctgctggcttcccaagccatgagccttctgataaatcttactgctctgtcagagcctctgatttaggggtagggaggggcagtcaggagaaagcatagttagctctcgggcagctagctgtggcagacagcgtgctttgtccctcagatgagtcacaacaagcgcccttggcaggcaggaaggactttgaagtgtggtgccccaaagggctggtccaggaggcccctgcctagcccctgggcctgtcactcctgaatctccatcactggcccgagggcaggcccaggcttgaaataaactcaggccaagctggaggcgcaattagaaggaagagagccatttggctttttccaaaaggtaagaaggaggacttctcatttttgtgctttaaatatcaatgcactcttttgatgccattatttgcattttctgagttccactgttcttgggcaaaatccaatagcccagctctgaaggcctcttccacatacgtgcccctcccctggagaatccctcacaccttctttgagctaccaggccaagaaaattgtattgagctttacctcgtgaagtttgcattttaaaagcaagatgtgttttttcatctctaaatataaagttttcacattgaataagcttttccaaactatatgcccttcatctggatactctgtggaagcaaagggcagcatggctgggtggtgctgagtcgggcagagctctggtctgtgcatcgggagactggccactcaccagatgacttctgggagccaccattccttatctgaaagctggacagctgggggcctccataccttacatcctgcccaccttccacagagttgtcatcattgactgagttatgtctagagaagcactttgaaatgcttctccagcattccaggtcagaacagggtggcctaccccacccaaagctgcagaaagagaggggagcgtgggtccaggggagaggatgtgtggggtctaaagatgcccaagacagttcctggtgagacagcccaaaggaggcagcaggctagaaacttgcagaggaacaaggaagctgtgacaccttcttacctggggacctcaggacaggaagaaatcatgaaacattcttactgggaaagccagaggagctttcctagtatttttgttattggtaacagctgtgaggtgccccctcagtgccctggcaactgtcattgtcacagaccccaggaacatggggctttgggtacagtttgaccctctccctgagatggaagatctcccttaacacctccccccggggacttgagacaggggtggctcctttgctcggctgctgcactctaaccctttgtgggaaggggagcatgcaggtgagtgggtgcaggaggcagggcaagtgctcttgggctttggcaggaatgaaccccatacctgcccacaacaatgtctagtggttgcctgtgacctctagagcctcagagggtgtgagttacaaacagtgctcctttagtattttccatccgtggatgactaaatgttaaaccaggtcagtggaggatcagggcgacagccttttaccccctgtcctcttggtgcctgggttcttgtccgggatctaggaagaatcaggtcacacagatgtgaaggatggtgaatgcaaagattttattgagtggtggaaatagctctcagtaggatggggagcttgaaaggggatggagtgggaagataatcttcctctggagttcagccatcctcagccaaattcctgtccaaccatccccggctgaactcctctctgaccatagtctctgatgtccagctgcctcttctcctctcaatgttcagacacctcttctcttctctccttctctgccacgctgctctgctcctctgccagcggagcttggggttttcatgggagcatggtgagccaaaaggcaacatttgggcaggaaaacagggatgtgaagttttcatttagggccatgggtccaggcttgggggtggaacccttgccagggaccccactcttttcttccctgcctcctggccatatcatccccatgggtttactgcatcttattaaagaactactcacaatgacctcagatcattaataactcagcatctgaactctgacttcctgtctcctgctttttggatatattaatgccaatgtgtctgcctgtatgcaccaggggtttgattcccccttgcaaggtttttaggagatttagacagtgagtcttacaacagctgtgcccagtttttaaagatctcgcctcctggaggtgaaagcaaggggggtgtattcctaaaactatatcaccaacagtgtgaagggcctggtactttgcattatctcatttattcctcactacaccaccatggtgtggataatattaaatccattttacacagctaagaactgaggctcgggaaagttaaataacatggatcactggtggaccaggactcaactccagcctgtggagctctagaaaccaggtcattccttcgtgccctattgcctctctctgaatgcaaaggctaaagcagagtgaggaactcagcaatgagtaatggctcattgtgaagtggactccaggtggtgcctacggggcaggggcttatgtgcccataactgactccatctacctaccaagttctcattagggtcaaagcatgcgatcagagtcagaggctgggtttgagaacctgctccttttaccgaataatttcatccccatgctgtacgagcaaacttgactttgctgaccttatctgtagcatgaaaacccacacagggctgctacgaatacagaacgagataatgcaaataacgtgcttagcatggcatcttctctgaacacctcaggttggcttagggtctcccattctgtgcccccacagcactctctgcctcccttgaagcattcttccctcttatttatccatctgcttccaagctacctaatctcaggggccccatctggcctgctcaccactgagtgcacggccctgacagtgcctgacacctgggcagagatgtacacctctaatgctgatctgctgactggtgaccacggaaggaggcacagcagctacagctattgttactgcttccttcctcccccaaatatacttgatgcttcagtggcatctccctcctgccctccccatgccaggcacctccatcctcatcctctgagccttttctcccaagtccccttctcccaagtccccttctccccactgccctcagaccccctccccatctcggcctagaagccccccaaggcttggtcctcccttcagtctctcccagctcctgcccacagccttctcagaataactggatggctcttagtgacacctcagggtctggaagaggccagaattattctgatactactgcatgtatgtttttgagtctccagtccttgttggtgtgctgggcctctgtggcaggggtgggaacctgtgtcccctgccccctgcccaggcccagtgccaggctgcgcacagaggaggcttcaggatgagtctgttgggcagcagccagggtgcccacagttaagtttcaagggaggacttcagctgcacctttaaagaaaaaaattattatgctcacattcatttcacacccttgtgacaaaggacacatttccacgacctcatctgatcatcatcaaccaacctatgaggtcagcaggtaggacaggtctcccctttgaacagatggggaaacttagtcacagagtataacattatagagctagcagacaggagagcaaccacagatctgggtggggcatccatgatggtcaagaacaaacccgagagccagactggctggtgtgattcccagctcttccacttatagctttgtttccttggcaaattacttaacctccctatgcctcagttttcccttctttaaaatggacataatacttagttcataggctcattatgaggaataagtgagttatgatcttcaaagcaagtattaactgattacgtgcctggcagctagtaagcactgaatgttgtaaaataatgcaacctagacatgcatatggagttctttacactatgtcctctccttttgtacacttctgaacacatccacaatgagaaggaagggagtaaagtgtcacctatttttctgttacttaaggaaggctctagatatggcatgagcctctgacaatgggatgaggacctcattctttaaaactttcgttaaacatggtgaatttcctttatacatgaacattgtaggttcatgcctcttggcagagaagatgaatacaagctgaattacagtatctcaataagatggcagtgtttattgcaaatgctgcaacatcctgcttgagaaaactttgatttgtagtctggttctatgactccaccaaagctagacaattatccaagcagcacctgacctttttgactgtttatcttattggctggcagtggtccaggcctttaatattatgcttctcctcttgttcctggagctttgagaaagataatgaaatgagttgagcgccacgtgcaacgtggctggctaggagactctgctggatagtgcaattggaagggacacctccgtgtgcttccaggggcctgggccagacctgactgggagctctagagaacagaagcccaccagctggaagaggcaggcaggaggtggcactgcaggcggtgtgaatgtgaacagcaaagggtttgctgtcccaggcctcactctgccacttgctgctgtgtgaccctaagcaaagcctttaacctctctgagtctcagtagtcctatctgtgaaatgagaattttaatgctggctctgacgacttcacatgtgaaactgacctataaatcttcaagtgcacactgatgttgttgtaatctggagataagcagcaatctactagcaatagccttgcatcgccattcagctttcatcctccgaaccagacttgtaggcccccagtgccagtgggagccctggtggtctggtctcacggtcaacaggaaggtctgctgtgccaccgccaccaccactagaacatcgctcccttcaaggatttattccttaggttatgatttaagccatatcaattataataccttaggaataataggtccattaatttttttcctacctatttgaccctctgctatgagcaaggttatttgctttgttttgcttttgtttttgggtagggatgcgagctgaaagagatagacagatcatgaggatcttcaagttaggggcattagaatagcactgtggggcagggcagagggacttgtgtgtgtaggcagcagcacacagatacggggctaggacgtaggcctggagtgatgagggtcaaccacagtcttcccaacatttcctggaggtcaacctgcttttaacagccttcattcttttccaactagtgtctcgctgccctgccccaaaatcaaggtgaagcagatactactccaggccaaagacacatctcctatgactgaccttctggtcttggccacacagctgactagctgcttgtgtcattggacgagtgacttcccctcttgtgtcaaggtgcgctgcagagggatggcgttggaggcaggagtgagcgcggagctgtgaggacccagggaggagggtttagaagtcaaggaggaagctgcaggcacgtgactcctgcactggcctcacctctcaccagctctgcaaggcccggagctgccatcccaaggctgcttttcctttcctttctttttttaaaattctttaattaaacttttttgattaagtgacagcttttaccactcctggcagctgctgcgagacaagataatttatagatgcattgacactatatgattaggaaagtacagtaaataacagatgagaagatgactcgtgcaacctgcagggcccctcctccatctctccagtccagcccccaccatctcccagtgagccccaggtagacgtctgccacatcactcaggggctgcgtggagcactcggtgcctttcccaccacaagatgacgaagatgtggtgttgacagactgctggtgtccgtggaccacagctctgctctggggccccagggactttctcagagatgcctgtttccacctagaggaaagacttaatgattctcacccttgaaagtgtgtacagaaatcctctagtcagaatgtccttgctgtgtaccagggcacactgtgggctccgtccagccaggcagggcctggactcaggatcccctaggctggtcacctctggttgtgggcgcttcatccatttccctgtggatgccataaaagcactgtccctttctctgtgtgccacactatggaaaaggttgagaatcaccgctagtccactccggggcctgtagcaaggagagtaattgaagtgccccgggaaactcgagccgtgtccttagctcttcagcactgccggagccccatgctcctcaggaatgagcccctggccttttcctcacagtaactaagagcgctcatgggggcagcctagcctgtctttctgggtgaagcacatctcctcctgtcctcttgtctaccctaacattccacgtgttcctttctcagggtaaaggccaccctcttcttaggagccccgcacccaagccaggcattttgcatgggaagcagtgccctgtgtacttacaatcagtattgtctaggcaagattaaatcagtgacattcaaccgtatacaatcctgcatgatcagacgatttgttggaaggcaggattcgagttcctctcagaagctggcttgctgtgcacgcctctcctaacatggactctcctcaagtgcccaggcagaaagcggccagctcccagccagatgcatggggggccctgggttccagaagatcaagtggccaagcacatgaagacaaatagtttgtctcgtcagcttctgggggtcacttgttcacatgggaagaaaccaagcagtggaggttaccatagaaagattacacagccaaagtttgtggctggattttttttgtggcttttctttgtgaagagttaagcatgaaggaccgagggtatccaggaagaagagtagctttgggattatcaggaaggatccacgtacatgtttctgacttcttctcaaattgcctggagcagtgcacaggacatagtagatctttccataaacactgctaaactgcacaaggaacttattctgttaagggagctccctacctctgtttccccacctgacaggcatgctagtttagactccttcgaggataactcggctactccctgtgggatatctggaaagaatacggacgggatatagatacattctactgatccaagtcactttaaattttttaaaaattttaaataattataggttcataggaagtttcaaaggtagcacagaggcagtgcccttcacccagtttcccccaatagtcacaccatatgtacataacgatggcacagtatcaaaaccaggaaactgactttggaacaacgtgcatgtatagttctgtgttgttttatcatatgtaggttcatgtgaccactgccgcagatgcagaacagttccttcgctatggagatcttccccgtgtgcacatttagacacacccacccttcctcctcatcatccctaacccctggcaactacttatttgttctccatctctataattttgtcatttcaagaatgttatataaatggcttttcttgcgtttctgtggattcgttgaacattttttagaactccatttttatctacctctagtgtttttgagtatatctcttcgtgtagctgttttgtggttgctctaagtattacattatatatacataatttatcagtctactggtactacttttttccagcccaaatgaagtgtgtctgtctcacttttatcctcacccatttatgatagaattgccttaggtatttcctccacacacatgagaaatgcatgtgttacgatttttgcttcaactgtcaaaatttagaaaactctagaggagacagaaagtgtattcatttgcccatattcttgctctttctgttcttccttacttcctgataacccaagattccttaaaaaaatcatttcctttctgcttagagaacttccttttgccattcttttagtgtaggtctgttggtgaccaagtctattagttttctttcatctgtgaaaatacctttatttccccttcatttgtgaagaatatttgcactggatatataatttggttgacactttccttcattaggcacttgcaaaatggtatgctacctctttctaatactcctggtttctgatgagaaatatgctgtcatttgaattattttcccccctgggcaaggtgacatttcccttgcactactctcaagatattttctttgactttggttttcaagggtttgactgtgatatatcttggtgtggatttctttgggcttatcctattttggcttcactgagcttcttgaatctgtaggtttatgtcttttgctaagaaattttcagccattatttctttgagtactttttcagccccatcctcctctttctctccttctggaactctgatgacatggatgttagagcatttgttataatcccacaggccacccaactctgctcactttttaaagattattttctctccattccttatattaggtaatttctattattctaccttcaagttcattgattccttccttcgttgtctataatctactattgagcccattcattgagttttgaaatttcatttattgttctttttacttttaaaatgttcatttagccttctttatgtcttccatttttttactgaggctctgtttctttgctgagactttctgcatttccacggtttcaagcctgcttgtaattgcttgttgcagcattttacagtagccacctaaacatttttgtcagataattctaacatctgggttatctcagtgctagtgtcatccaagtgccttttctcattcaagttggtgctttcctgttcttggtatgaggaatgatttccaattggaacctggatgttctgggtattatgcagctccggatgttatctgaagccttcccttacagctgctttcctttgccactgacccagcagggaggagggatgccaccatcttgctattccagtaagggtggaagtcaggttcccactcggcccccatcagcactcagtgaggcagggcctcctcattactgctggcgtggctcaggctcactgccagacctctgctgataccaccctggctggaggcagaggggagcctcgttactgcctcaccgacaccgcagcgagggagaggcctcattaccacatggtgaatgtcctggcgctcccttagacctcctctgacaccacttcggcagggaaaggggggcacacctcattactgcctagttggggtggaagttcagttttctcacatcgtctccaccgacaccatgtgggtactggggagcctcatcatgacccagtgggaaggaacgtccttttgataatagccgtcctgataagtgtgcagtggacatcgtctccaccgacaccatgtgggtactggggagcttcatcatgacccagtgggaaggaacgtccttttgataatagccgtcctgataagtgtgcagtggacatcgtctccaccgacaccatgtgggtactggggagcctcatcatgacccagtgggaaggaacgtccttttgataatagccgtcctgataagtgtgcagtggacatcgtctccaccgacaccatgtgggtactggggagcctcatcatgacccagtgggaaggaacgtccttttgataatagccgtcctgataagtgtgcggtggacatcgtctccactgacaccatgtgggtactggggagcctcatcatgacccagtgggaaggaatgtccttttgataatagccgtcctgataagtgtgcagtggtattgatttgcatttccctaatgactagtgatgtcgagcatcttttcatgtgcatattggccatttgtagatctttagagaaatgtctattcaaatcctttgcttatttttatattaagacagaaaatgttagacaataactattctcctccagccaaacaccacaagaaacactgcggcttcacccactcttcccccagcaaaggccaagtggggaacctcaacgtccatcctcatcaggctgtaacaaggcaccccaactcttttgccggggtggcatcaagacaggtggggaaccaggaatttccaacacacgctacaacatgggtgaaccttgaaaacattatgctaagtaaaataagccagacacaaaagaacaaatattacatggttccacttacgtgaggtacccagactaggcaaattcacagagacaaagagtagaattgtagtttccagggattggagggaagggatcatggggatttattatttattaaatacagagtttcagtttgggaggatgaaaaagctcaggagatgggtggtgataattgcacaacaatgtaaatgtgcttaatgccactgaatgctacacttaaaaatggctaacgcagtaaattttatgttatgtatattttaccacagttttacaaagtctgggtcttgctagacttcccctttcctgggcttttggctaacgagaggaggctctaattggggcttttttttttttttggtctgtaccttttgatgtttctgggttccccaggaatccagagaactctgctatgttattcctcaggtcctggggttcccttctggtctactgcttctctcctcttttagagtctttttatgtttcttttacatataacgtacagggattttggttgcacttagtagggaaagatgtgtctactccatctttctggaagcagaagtctccaggccactttatgtgaagagttttgtccacatttcatttctttttgctcactagtgaagtcttattcatttcaatttagtatataaaacttatagctgaaaaatatatttcattttcatggaaaaggactcctacttctgaaaccttgcattgatatttctagacatttccagggcaccagtcataacatcaagtaagaagcctattgccatcctccgtgacatccccttcctcaatatctcttttgcccaatgttgcaataatactaatcccaggtgtgttgactagtgccactcataatcacattagtttatcctacttatgctgatccttgtcttcttgtcctgttagtgtcttcagctcgtggctctgttccttttacactcttgttagcacatgtgatcatacacacttacattggacttgtccttttgtcctcatgataactgctgactgttaaaacacttcttggatgaagcaccctgatgtagcaccctggtaaaagcaatgggctttgaattgggatgtttgggttccgacctagttttgccactaatcagctgatcgtctccttcccctagatgtttagcctcagacccctcaccactaaagtgacaggtgtagaactagatcatccctagggacccatcctctgggaagtatcttcaggttcaggctagtcagctctgataaagtcaagagcaccgtcagaccaggaggttgagaatggaggtatcaccgtaggtgtgccctccttgatgagtttttgctgatggatatattaaccagcagtggacggtcactacaggtagaatcttcaacgagactcctattttaggtttctcaccataatttcttaatttttgttggcaattgtgcttgaagcaaaaaccaaattagaaatgatgtttgtctgttgttccccttgaagttaggtgccttgattgcgggtcctctttctgtctgccacttcctcgcagtcccccccaaaccccttatagtcctccctgaagctgcagtgttcaccctagcaaggcaagtacctgtgctcccttggtgcctcccatggcacttgtgccaaatgcaagaaagaggagccaacgcagggcccgctgcccagcaggggaggtggaggcaacgcaggtgtgatgtacacagtccctctcaggtcagggaggagagggaagtagggctaggaggaaaatggggcaggagaggaagggagagcacaagggagaactagtggaagggagaggtggatgagcaggacagctcggagagacaggaacgcaaacagaggagaattttcgctcggggtgggaatgaatcatcctcacctgccagccgcgggcctcagcaagctggcagcttcgtcctctcagactgtgggttgcttttagctgtcagccttggatggtgggctcatgcattctgttcccactccaatctgccagagggacagggtccttccccgcagcactgaggcttggccagtcgtgatgcctatggcgaccgcagaatcgacctcaacgagctcgtcgccgggcaccgttttagcagccccaccacccatttttggaaacacaaccctggcctcccattcacagcagaaaagggcacaaggcccttcgtgtcccaccacctcccttctctctggaatcactgtggctctggttgtggaagtttgtcatgagtggaccccagcaaggaattggtgcatgatatagttttcgttttcaaaggaccatgatttccatggattactttgtgcaaaggatgccaaaaccaaatatttaaagtaaatgaggaaaaaatatgcttggagtaaaaagcatctggaccctgtgcatgtgcgtgtgcatgcgtgtgtgtgttccaggagctgactctagctgtgaggatggctcgcctgtgtgtgtgtgtgtgtgcatgcgtgtgtgtgttccaggagctgactctagctgtgaggatggctcgcctgtgtgtgtgtgtgtgcgtgcacgcatgtgtgtgtgtgcatgcgtgtgtgtattccaggagctgactctagttgtcaggatggctcccctgtgtgtgtatatgtgtgtgtgtgcgtgtgcatgtgcgtgtgtgtgtttcaggagctgaccctggctgtgaggatggccttcctatccttcccttctcctggctgccctatccttcccttctcctggctgcctcccattgtgacatggatttttctctcatctttctctccctactccccttgcagcatgagaggcccagtacctgtaagactaccaggctccatcactctccagagaggccagttctgcctcttaggaagggcctagatcagcgcaaatctcaccatcatgatgtccccaactgctccgcccgtgtatgtgttgggtatttccaactgtccccagcaaagcctgcctcctccccacctcctgagccctgtggggtatcaggagcctcaccactcgagcggggaagaaggacagagcagcagcctcagcccacagcagccctgcggtggagagctgcaatgaaggcaggccttatatagacaggaaaagcagggtgactggaagtactcagtcacgggcagagtcagagccctaggacctttagggacaaggcaggtgaaagacctgttagaattagggagtgaggggctggaggtggggggtacactggaatgttacggttctatttttcgctgagtgaaaaccactaacaacaactacagaagccctgctccttctgtgggctaaaatggcactgctggctgtgtgttcagagcagctaagaaccaggaggaacagagcccttgcctctgttcctagtccccgggccctggccttgccggagtcaccggaggcaaccaagagcccctcgttcagaaagcagccatgaggtagcctggccaccctttcaccttttacaccagggagcccagaggtttccagggcttgctgaagggaatccaataagaagaagatttcagatcctcaggtgtgtgcaggggattagcccagcgctgctgtctgtccaccctgaggctcctcccccatcctcaggattgctgggctggaggcagaaagctgcaccatccttctgaagctctgccccaaaggaattgcagatgtctgcttcctttcatttggggagagaagtcggaggcacaggggccatgaaaggggaaggcgtttgacttagatagcctctccctcctggctgtccctctgagctgtcctgtggagccaggaagaggctttctgggccccagagctgtcttcttgctcgagctaggccctggctccccacgcccaagaccccggctccccacgcccaagccccccccatgcccacctgccactccactgcccttagctcgttacccctgtggctgtggaggtccctcaggaaaagcagctccccaggcaggggtcccttccttccctcaccacagccccagccccactgcaggacgcccaggataccacaaaggccccccacaatccctgctggcaaggccgtccttccacagcacacaccggagaggccttctctatgtgcctcgataacctcagacctggcttcttagagaaacgggtcaggcagtgacgtttgtggctttgtactccattaagtgctcttcaggccctccctggatcttttgagatcatggggataaggggcggtgcccagcagacctggctgcttaaaccatggtctccaggagataagagatgcataagctccaggagcccagcagtgagacaggcgcccccgcggccagaggctcacactgtatgctttgctttagggctcgggagaaagcacattgagctgcgagtgagtaagtttgccctatctctgtcattaattcaatttaattcagtcacctccgcttcatagtaagtgctcagtaaatcatctcacttttttttgaaccagagaataaatatattgatcaatatgtaaataaatagatatttaagagatgcctatacaatggatttgctgagttttcaaactattgaaatcaggaggaaggggctatgctggaggaataaacgtgtctgaatgtaggtttgtctcatgttgagtacgtagcagagaacctattctacgggatagaattgtggaataaatgacatgagggcacactgagaaaagactctgaaaagcatgcaactctgtccaagcctaacaattcaaaatgtaagtaaaatttatgatataagtgaattggctgctagaaagatactctcataaaataagctggttcttgggccgacccaatgcttttttgttttcttgagaaggagtctcgctctgtcgcccaggctggagtgcagtggcgtgatctcggctcactgcaacctccgcctcctgggttcaagtgattctcctgcctaaacttcccacgtacctgggactacaggtgtgtaccaccacgcccagctaatttttgtatttttactaaagacgtgtttcaccatgttgaccaggctggtcttgaactcctgacctcaggtgatccacccgcctcagcctcccaaaatggtgggattacaggcgtgagccaccacacccagcctacccaatgctttttgaatgactgcatgaacaaatgaaagcaatttgataaagcgtgaatgactctaccatctatcctatccccataggccccctcccccaacactcttcccctcctcagtttgaattgccatgtgaatttattgctcctgccaaatgaagtcagctgagatggaaatgttaatttattggaccagacatgtgtcaacagagctctgataaaatgcagcgacatgctgttccaaagcccgctatcccgaaacctcctaccatcctgctgcaaaactgctgtgtttgaggtttcacagcccctctggctgggtctggccgccgtcctaccatctcactcaagtcccgccgtccctccataacctcatgtgagacacacgggtccccaaagccaacctgacctttcccacctgcatctttgctcaccatggtccttccacggagaaggccctccactgccatttaggccattggaactcttctgtcctttaaggcccagctcaaatgcctcccgttcctgagctagaggtgagcttcccttcctcttccccaggcacttctttgttagggaacaggagttttcctctcctgctagactataagctccttaaaagctgagaccatctgatgagtttttaaataaccccccacccaaggctgcccccaaaactcaaatcagtgccttgcatagcagggatgcaacattaggcagtgcagagagagtgggattcagagtaagactggcccaagtcctatcccgtctccgttatttgctggccgtgggacccgggataagtggcgtaatctctgagttttagttgccttatctgtaagatggggatgacactagtcacccgtgttccaagtgtcacttgatttactgtctgcacatggcactcactcaggacatagctgcctgtctctgtattctcctcactccactagagcccatcattttcaatatttcttttaaaaggactagcacttaagcaacacaaacttcccattccttttgtggctcagaatttgggaatgggaattttactgagatcatcaaaggtgaagtcgtacataagccatgaggcagacaccagcttcccgtggatggccggattttgattgcctgtgcttagtgggaacagaagggaagggaaggacctgggaggcctggataggaactaagttcagctggtgtctttatgcctgcgtcaggcttcccacctaccagtgtcaaaggaagggcagcgtcctttgagatgtcaacagctattctgagatttttaaaaaatgaaagggttctgtgttccgggtgtcagctgactgcagcctctacctctgattgagtgtcacagggcatacgagctcattaaaggctctgagaagtcctgtagcaaagaaacctttggactttgcttaacccagtgtttcccaagttttttgtaccccttactgaatgtgggcagccctgagctggagatgtcacttctagccagagggcagtcaggtgtctgccggggagaccctggcttcagttggacaggggtgctgggatcacgggctttctttctcccaagaactggcccaaaggccagttcttttcccaggggacccaaaacagggcttaccgcctcctggagtcaggtatgagtcatgcccaccgggctctcttccccaaggcacccgacacggtctgtgtgtgccatgggctcctgttccataggcacgcacaccctcttctgctgggcagatacctctgtggcatgcgagtgtgggacctgaacccaggttctgtcagggtggcgagggggctcacgcagaggatccacttttctgtcttgctcttgtatgttttctcttcctatttgcctttttattctcctttgtatttttaaatgttcctctctagtaatttttgctagtcttttttatctctcaccttgtttcttccactgtgagtaggctcaaccattcgcctgttgtcctatgagccacatccacgcttttctacctacgtttccaaacttgagcctggccggtacactgacttccaagcctcccgtggaggccgcgcagcgcccctgtagtgccccatggcagcaagctggtgacctgagctgtgatcatgaaaaggaaatattcagcttttcttccaagtggaaatactttatgtattttctccaaggccacagaaaatgaaaataaaaaacagtactggcagcaggaataacaccaccgtcccaagaagaagaaatgaaaacagtgacacactctgtggctgccgctctcctctgagttggtcaagcagaggccctggggaggcagaggtcggacagtggtgaccgtcagtggcagttacagccctgtgtgttcggggccttcctgcttgatgtgaccagagctgagcttggcggctctcattgagcagctaatgcaggagtccccgccatggtggcctcgtcccccagcccctctctgtctttgcttctctctttgcctacctttctctcctccaagtgtggtcaacctgccctttccctggccagctcttatcaggcaccccttccccgcatttcccggccacccttctcttatgcgctgggtgactctcagtgctgactgcaggcttctcttcctgctccttcctctccccttccctttctgtcctctcagaggagcccaggtttcaggctttgctgaggtgagggtgtgggggcgggacctcttcacgtgtatcctcaagctggtcccttcttgtcctgcgggtcccagctccagtgcctccttctcagagaggcctctctcagccctggttgttttcctttgacagctcatcgctattttagaaaggtcttatttgttcactcatttaccgtccttcccacctgcgtgcacctccgtgacagcacccttcctttatggctcgctttctctttcttctcttgttccccactctatttcgtgggcctggaaagtatcaggcacattggagatgctctatcggaaaggaaaaggaatgaaagaatggaaggagtggtggaagaaaaggaaggagggaaggaaggagggaggaaaagagaggggaagggaggaagaaaaaagagaaggaaggaaggagtgggggacgattgtaatatttataagttttaacccaatagggtagctgctaccgtctccattttatagaggggaaactaaggcacagtgcttaaggaatttgtcccaggtcaaaccactagtaagtggcagcacctggctccagaaccagtctgtctccagactctgggctcaaccaccacgctctgagcctgcagtaagatgtacaaggcagaagtcctgtgggtgacaattgggactccacccaccatgccagggaacgtctccatcagaagtgggagaagaggagttaatttttacttgacactgactgtggaagtcattatctcagacacaatttcacttcgttttcatcacaaccctctgaaaaggaccctttacaaacgaggactctaagaatcagagaggctaagggactggccagagttcacacaactagcaagaagcagaggccggattcgaacccagctcttctagctccacatccggagtgttcacattcctcatgctacttggcttttcatcacagacagtcctttagatgttagtgactgcctctccctgttgtggaaagtcttgttccgtacacacctctcttaaacatgcttgcagtggatcaagtgtgctgttgcagtcacttctatacaatgtggagcagccagtcctctggcaaggatgtcgctttggtccaatggtgaaatcagacctagctcatgtcatgctgatgtagaaggccttctcctaaaagtggccgtttccatgcgtggggagactccttgtagctagcccatactctgcgatgcgggttgtatctgtggctcccgcccggtgatgtcctgtcatgatcagcttccagcagttgtgacccacttgcagtcattcaccttcacctcatgggcctgcacggtagtggctacagacacccacaacaggttcagtggatctcaactctggctgacagtgcttgtgggtgcttttaaaaacgctaatgcctggggcccttccctggccgctgtttaccttgtctctggggatagggcccaggcagtttgttaaaaattcccaggaggtacgcgccaaggacctctttctggcctgtcggatcaaggggccctgtgcgtgtgctgcagtctgtttggtggcatgtgactggctgcaaggtggtccaggcggatgacaagggagaggtaatgatgctgttaatcagaaacattaatctgtgctaatgtatcatccctcccaggtagcagaacgttctcattcagttaaaaatctcatctccttgaaaaggcccttgagaagtgagtgatgtgaatgctgacagttttggaaaccagagagagattttgggcaggagacttttcactgtgctccaattcccccctgcaggtggctacccctcccgcctgtagcaataaagattgacacaggaatggcaaggggggcctcccagagcagacattcttctagctgcatattcagcaaatacctgtgcggggcctcccaggtacaggtgctgggctcagcagggacttcagtggagaccaaaaccaggtgcagttcctgctgttactgggcttacatcaagcagaggaagttgaccttacttaagtgattctttcccacaggatgagggagccgctccctctctgcttttgggtccctgtctaaccttctgcctcagctcgctcagctgcatagacagataggcagaaccctagcattacggcaggcatctcccaggctggcttctcctgggctgcgggtggcctttgattttggagcctctgctgccccacagtgctccccacctcccacctcttttgcctttggatggggtcttccacatttcagatggctataaatacaacaggtgcaagttcagacgctccaaggagagcaaccactgccattgggttgtgcagtaaggtgtgaatgactaacatcgaatctgtcctgagagtaggttttagtagagagagagaacctggcagagttgcgggcctgacgagggcaggggaagagcctgtaaaacaagccctgcccacagcagactgttgctcagttaggccagagccctgtggaggagatgagtgtttgagtgaggagagagaggaggaggagggcaggaagaggaggaaaaggctcttgtgttatgttccagttatgcaccacaaggactgcatcatcccgggaagggcccaggatccctcctccagcaagtaaaatgagtttcaaagagcacttgggcaatcctgatcagtgggactcacctttgcctgcagggagctgacacccctggacaactggccagtggagcctctagggaggtggggtcctacaacctgacacgagccaggtttagcctcagatgcagcccatgctgacccccagtgggagcatgctgacccccagctccactgcttgtagaggggattgggagctgaggggttctttacctcctggagtcacagagccccttatggtctgttggaagttacagacccctatggaaacatacaaacaaatgtgtacatgcagcactatatgtgattttacattataaaataagcactaggagggagcaaaaggatggggtgttcattttacagattagaaaactgaggccctccggggcataacgccttcctgcaaccctaggcctctctgcctgtattaggccattgttgcgttgctgtagagaaatacctgaggctgggtaatttataagaaaagaggtttcgttggctcacagttctgcaggttgtaaaggaaactcagcaccagcgtcagcttctgatgaggcctcaggaagcttccaatcatggcagaaggtgaagggggagcaggaaatgtcacatggcaagattgggagcaagagagagggagggaggaggtgtcacacacttttaaacaaccagatctcatgagaactccctatcccaaggacagcaccaagacatgagggatccaccgccacggcctgaacacccccaccaggcccacctccagtcctccagtgttggggatgacatttcaacatgagatttgagggacagatatctgaactatagcaccaccatgccagttccctttctttctgtcatcccagatctaccatgaatcatgtgtcacatcaaattagactcgttagggcataagcaggggccccgcagtccagaatgttccaaataaattgagacttgtccatctgtgtgtcctgatttgggggttcaaagaatagtccctctagacaggggcacaaacccttccttcacacacagtaggcccttgaggaatagtggttgcagcaataaagaagagaagagaattctcaagggtgtatgtggcctctccccctaagagattttgactctgcaatccaacctcaaccacacgggagagagggcagccagtgctgaggctggatgggggcttcatacctgtgtcatcatgggtgccggggcccagcctgccctgtgctagggtcacttccacaccatctctgtacccgccaccagtctccaatttggcccacattgcactttcagccttgctctggccctgccaagcttttcgtaatggggtcactttggccatggcctcacccctctggatgtcaggacaacgcagccagacagggtaatcagacttaggcaaaatggtgtgtgtgtgtgtgtgtgtgtgtgtgtgtgtgtgtgtgtgtgtgtagggggagggagcattcaacagggagagaataccagataataaagagctacagagccaacagggacatggagccactcccactaactgaacctccctcctctttccctccatccttggaagttgcgttccagccagctgccactgttaattcatatgagagattggaccagggagatgccaccaggctttcacccccgctgtgatgctgaggctgtgggagggatggtgtggttgactggggccaccttcattagacagagctgccatcctgataaaggaaaggcttcttgtctcagagctgtgtcctcccactggcttttctccctgcatgctgtaactggtcatctcagtcctgaagcaggtatgtgtgttgggccaaggtggaaggagagtgacactgttattaaattaacccagtccctttcattgcatcctccaagtgaagaacaaaagggattttgcatttgcccacagtgtctctctaagcaaggtctctggaacatctgtaggaactcagagacgtttggaatgggccaataaaacatggtgagcatccagcagcagcctggggtgctgggcagagccgggacctgggtaggaatcacagcaggattccagccctggctctgcgccttgcattgctctcacctggcttccatatctggaggaacatacctatttctcacgatcactgtgaagatggaatggggttttgtatttgaagctctgtgtgcagttctggagccccgaatgtccttgggggtgctctgaaaccttagtgcctttatctcttctaatggtaggaaatgcacccttattttagtcagatcctgtgaattaaattttaaaatggccataatagctaagaaggtaaactattagtgactaactaagttgaagtctccatcagtgtcaagaagacagtttcatttgctgttacataaagttttcagattgtttttctcatacttccaacccaaacgtgcagaatatttaaagcttagcaaaaaaaattatagggaacttagaaatatataaaacatgtgatgattgtaattttcttgtgttaactgggtttgcaactattttgctaggataatctgcccaattaacctctcatataacttctgaaacttgtttcatagaacacgtaagggcaaaggaaaagcaagactcagtcaatgtctgaagcaaactggagtcaatgaggcaatgcctgcttagaactttgcacgcttgaagtttcatactgttaattaaatctgcctcaattcttttttgagggacaaatgggattcaccatgggaaagagagttatctgagaggaacatcccagattggagaaggaagaggtcaactcagcccaactagagtagtccaacagtttaattctatctcactacaacataagcgttctgtcaggtgagcctgctaagttcctttcctctcttctcttgggtctgtaagagtatcgcaattctggccggacacagtggctcacacctgtaatcccagcgttttgggaggccgaggtgggtagatcatgaggttaggagatccagaccatcctgtccaatatggtgaaaccctgtctctaccaaaatacaaaaaattagctgggtgtggtggtgtgcacctgtagtcccagctacttgggagtctgtggcaggggaatcgcttgaacctgggaggcagaggttgcagtgagccaagatcatgccactgcactccagcatggtgacagagcaagactctgtctcaacaaaaaaaaaaaagcatcgcaattctctgtctcttgtcatggccatgctaggacatgggcaacctggtagtgaacaaaatacctttctctgttcctccactcagggaaatctactaatacttggttagactttaatttttcaattttgcaatctagaaacagaaaatacccataaatatcccaaaatagaaacaaaatgcggcccattcagtttccaaaaagtaaacaaagtgattcttcctccatgagatgcctgaatacattcatagttggctaattaaactaccatagaaacaattattcaatataggaggagaaagagaggaggaggaaggagcgggagcattagcagacatacatggcttttggctaggaagatagctgttacaggccagtggaatggagggaaaataacccacggagggcagaatcatttctgcagacaagtctatgaaccaagctgagccttcgtccttttttaccaatagagtttcccttctttccccttggtgcctccccagccatctgtaggaagaggatcccaacaagccttccttcaagtcagtttcagagcatttctgccctacaaggacctgggtatatcttggatgccttgggaggctcattgaagtaccataggatggccatgttttccaggtcatctgagataaccccagcataatcacctgtgtcccccacaaaattattaatagttgccctctttagctctctaaagtgcccttgtttgagtgctaactcgtgtggccagtccacataccctgcagggagggtaaagggcaccaccttatgtgtcagcgctgactggcagcagctgctggagtgctgtgttgaggagggttctgcagtcgtgttgtggctcagcaagcaaagccctggcaatgggttaactgcagcggcccgtggggcaagtgagggagaggcagcactccctgccggcacagaacaaacgctggccaggtcagggtgtgggtttcaggccagctctgctcctagcttcctgtcatctgagtgggatcgtttcccttctctgatgttggaccaagatacctgaagttttctttcaattccataattcgaatctcgtcctccatcgaggattagcttggaagggagctccgatgtcatctagcatgatttcccactccctccatctagtgggggattgtgcaagataacatccgagctcccttccaaccctagaatcgtgtgatcctatggtaactttgtgagagggccctctctgctccagagtgaagctgcactttgggacggatgtcagctagtatctagtattctcatggtgcgttttatagttgacagagcacttgcatgtatctgaccacagtcacatgactctggctttattttcatcatcttcattttataggtgaagaaattaaagctaagtaaaggccaagtaaaggggactctgggctcaaactgcctgggttcaagcacttgccgtagctctcacaatatgtgtggtttgggcaagttaatctctcagtgtctcagtaccttcatcggtaggatggggtaatatacttacatcataatgatgtttcgaggattaaatgaaacgattcatgcaagctgcttgggacactggttggaatatagaacacatgtaataaaatgagttgatagagtgagtggtagaggtggtggaggtagcaattaacagcagtggtagtagtatagtagttacacccagcaagtaaatggcataactgggactcttctcagaaactgaccccacagtctgtatgtgaccccagtgaccccagaatttactgcgctgtgtctaccttaggatttatatccacaggtcagaagcagcaggcaaggtaatgagaaaaataaagatgatgtttaaagagatgttttccccatctagccctgagagagtattggctggggagctgaaattctcccctcctcaacctccgataatctggtaaggtcagtggcaggtgcagggtgcttgttatgccattgctgtactatgggctcatggcaggtggctgaatggacaagctcgtgctccctcccgctccccctcccctcctcttgggagagactgcctgcgatgtcagtgtttcttcagtaacccgcgcacattatgtggttccatatggatcagtaaatttcccccaatctctgtattacaaggtctggtgcctcattaatggcgtcttcagcgccacaagctgaggctaacagctctgtgtttttccatcttcagtgggtctgcacacattttcagcaatttgcaggaaagacctcaattagccaaattcctacgtgactcagtgaaggcattcagaatgcactcagctgtccatcctcaggtggagaggggtgatctgagaggtccagagaagaggcagaaagaaaaagcaagcggggagaggaaaagtcaagggggagggagggaaaacggggagaaggtgagagaaaccacagcagatgtggaggagcgtgtgtgaggacatggttattttcacccagcatgagacagattcacttctttcttggatgtttggtgtcttggctaaaaatatgtcaactgaatgttgtctcagggacagggagatggagagcattaggacactttgcagaaagctcaggcctggaacggggctttctttcacatgtgggtagggggtgagtgcttgggctatgctgagagtggggcccagagcatcgacagtgcagaaactcacttctccaagagcttcagcagctccaggacccttctgcctgcctccctctcccaattccattgtgaagtggcaaagtctgttccaggtactgtgtcctgtgggagggtgaggaggaagttgaggaaacctctctcccagagactgagctggcagaggccatgggcatgggcgctgataagggccaggaagcggggagggtcctaacaccatgacaaggccaggtccttgtctgcagtgtcacagggctgtggtcctctattggccaacagtagctcctctgcacctggaggaggacgtggggcccactggactcacctgggcgactgtctgcactgtgggagggaaggagagtccagaggtctggtcagggactgaagcatggcatgaggcagccctggggctaatgcaggccctggctgtcacattccccagggagggataggcccggaatcattgctaggtagcatagaaacctaacacaccaaaagcagagaattgggtaaataaattatagtacagctattcctgctactagaatgctataaggttattggaaatgatattgtagacaaaatttgacagtgtattaaatgtttaaaagctgttgttaagcaaaaatagggaatataaaatgatacgaacagtataatcgcaattttggaaaaatacacacaaaggaagtagattaatcatataagcgaaaatgtcagcaacagtagcttcaaggaagtggaatactgctccttttccttttcctgttttttgggtgggtgtctcagagttttcttaaatttataacatagaatttgttatttggctattagaaaataaaattatcgagattataagaaataattgggacaacagcaagtcacattttgctgacttcttattggccatttgagaaaactgaaccaaaggattaaaccatgagagcagggaaccctggtccttacctttacaatataaccttttgcagccagtctttagaggtgtggctttaaatgcacttacctcatttccagcctgggcttcatgctctcctcatttgcaatgctaagctttttatctattttcccctcaaagctttgtagttcactttaaagactttactgaaggtggaaaagcatgggaagcctggattatccaatcccaatgcctgggacaaatgaaaggtcacaagaatgagaagaaaaagtttccagagggtttttagaaagccccaagagacttgggaagtcaagtaataatttggcaggaggggtcttccttgctttggtttgggtgtgcctctttggatttcgtggtattcttgttgggggaacagatgactatgttcctcatattctcgaaggcatttgtggtgggactgagaaattagcccagtcctcatggaagagaatgagagagtaggatacagctcagagctgggggcagggaacactggtgagaactaacccagcacagttattttcatatacccactgaatttccaaatcttatcaatcaatgagcagtacatacgcccaccctgtgcaaaatactgggttaaaaactggggggtctaaatatgatacatgcctttgccgtgaaggactggcaatctaattgagaaggtaataaacccatctgaagttaatattatcagaaataattgacaacagtgtgtgagagatgccacaaggtgagtagtacatgattaagtgccaagagagtggcatagacagtgagtgctgggtctgtaagaatgggtaaaatctgaggatacatgcagtagatacttcaggtctgggggaaataatacaggtaaattcttacagataggaaagcccaagctgtatttgaaaggcagtagaagggtttaggatgcccatgaaaattgtggtcagaaaggtgatatatcagttagcttgtgctgcgtaacaaactacccggatacttagtggctttaaacaaccaccatttattaacttacatttctgcaggttggtaatctggattggctcagttgagcagttcttctggacctagcagggctccactgatcttggtttggtgttcaagtgtctgctgtcagctggtggtttgctagagataggcagttcatagtggcattggctgatatggctgggatggctgggatgtcctctttccacatggcctctcattctttagcaggctttcttggcttgtttgtgtgatggaagaaaagttctcagtgtgagaggagaagctgcaaggcttcacgtggcctacgcttagctgttgcacattattccaccatattcttttggtcaaagcaagtgacaaagtcagctcagattgaagagatgaggaaatagactctgattctggaaaagaagagctgcaaaatatcgtggccatttttgccatcttccacagatgggttggttggattgggtgccagaccaaagaaccctttagtaggaaggacatagaaaggatgtaatgagctagagagtgggaaggacctgtgcttcccagtgccagtctgccgacctgtgccaatctgcaatgaaggtttatcagcctgcagttagaggagaaaaacaggaagggtgcattgtgtacatgccagggacggggatggggatggtagtggggttttcagctgttctttattctagtattgcttctccttcctttcatgaaatgaaaaggataacaaatgatcattgttatttttaatatattattggcagaataaaaagttggcaaccctgtgtccattcctaacatttcttttgcttttgtactgatcaataaaatcttgactagagcctgggtgtcactggatagcctatgaagatcaagaattcccagaaggaagaaatggctcgctaccgacccacacatcaaggaggccttcccagcagaggtgggatctcagctgggccgagaatggctagcaattgtcaggcatattttattttactttatttttatttttttattttttgagatggagtttcacgcttgtcacccaggctgcagtgtaatggtgtgatctcagctcactgcaacctccgcctcccgggttgaagtgattctcctgcctcagcctcccaagtagctggaattacacacatgtacaccatgcccacctaattttgtatttttagtagagacggagttttaccatgatggccaggctggtcttgaactccttacctcaagtgatctgcccatctcggcctcccaaagtgctgggattacaggcgtgagccaccgcgcctggccatgaggcatattttaaaaagtaaaataccattgattttggaatgtttatactgtattagtggctccttatcagatcaaacactcggcctgtcgctttagagctttcaaactgagaaacactttcaaaggaaagactgtctcttattacttgcttgtaaatggaaaacctgttttaattacacctgaaaactactttcataagattgacttatgtactgtctgttcaaaacttacagaagcaagccccaatttttttcactgacatttgaagccttccctgaagggacccccagcacatccccaccctctgtgccatccctaccctgcaaacccctgctttaaccaggtctaatgggcactgtgcttgaatgggcttgtctcctgctggccttgggtcctcccctgcctttcagctttctcttctgccctctctttggtgggaagttcctacactgccttctccaggaagccctcactcctggatccagccagctgtggtgttggctttgcatgtcactcacctggtatttagttctatttggggggctattaatcctgcctgcctagactgccaccttcctgaggcacagatcttgtcttcccagtccctgagtgccccgtgtgtgtggcatctcaaaggcggggagctttgctcactctgaaaggagccaacacagtaggagccccagactgtggggccaggcatgtatctccctgctacctacttatctgtgctgtgacactcatggtcccactgaacttgcaacccaatgagatgtcctcctggttggctggacatttccttaaagacatgagagaagaaagagagctcattaaagtcagaggtgctctctgcttgccctgggcagtgactttgcagcgggaaaccaagaggctgatgctgatgtttagcctgtgtccaagccttgtcacgctgattctgtgcaaagaggagaagctgggagcatcttaggtgatgtccttgtgttagttacttaaggttgctgtcacaaagtaccatgaacagagtggcttaagacaacaaaaatgtatacttttgtatcctggaggccagaagtctgaaatcaaggagttggcggggccattctctagggagaatctgttccatgcctttcttttcgcttttggtgttgccaacagccttggcattccttggtttgtagatgcattaatcactcagctttgcctcggtggtcacatggcttccctctttgtgtgtgtctgttttcccttcttataaggacatcaacatattggattaggggcccacaaactccaggatgacctcatcttaactaattaaattggcagtgaccctatttccaaataaggtcacatcctgaggtctggaaaagacatgtatttggggaagggaggatgctgttcaacccagtgccagcctggattctgtaacaaactgactgggaaggagtctgcgctctcctcggctaacagagagaattctgggacctaacatctattcagcaggcacacaccaagttgatgtgggggaaaagcactggggttggagtcagaaaacttaggtataagcccagtctccaccgtagtccagtggggtaaaccttgctttccttgtctttcccatggggatgataataccctttcctccctcccagggttcaggttaagaaaatccactcacacaaaagctcttcgtagcctgcaggcagtatgcacatggtggatggtaccatgcttctttttgtccaggagatggctttgtaagttaagttcagaaatttgcaaggggtgcttggagctatttgatagataccagtccctctgctcactcccaagtacttcgtgatattctatgggccaaaacaccagccgtgcccagctccacccatcttaggtgatgaggaagagtagtttccacaagctcatgagttcaggccaattgtggtgaggagtaggagaggaggctgtgcatacaaagaccagagatttgagcagcgccttagtcagttcaggctgctgtaacaaaatactgtaaactggggtatttcctggggacttataaaccacagaaatgtatttcttatggttctggaggttgggaagtccaagatcaaggtgctggcagacttggtgtctggtgagggctcattcgtggatggctgtatttttggtgtgtcctcacatggtggaaggggtgagctagctctcctgggtctctggtataacagtcctaatttcatacatgaggccttctgccctcatgacctaatcacctcccaaaggccccacctcctaataccttgggggttaggatttcaacataggaatttgggggagggaatcacaaacattcggaccataacaagcagtgatcttaactttccacagatctgctgtgctatgtttcattccatgaactggcaggacaggtgttcttatttctaactagaatccagagacactcaatgtgttgcctgaggatctgcaattagttcatggcaaagtgacccagataccttgattcatggtccagtatattcttttaactagttcccaggactgtttacagaaaactgtagacccatccaccctcacacttgccttgagtttgctctccccacctgcccacccctgactcagtctgggaggtggtgggggggtccgagcatgtatgagacccaatgctggcacagagtatgtgctccgtaaacacttcctttcccctttcccctgtaaacccaagcaccctggtctctgttcttcagatgccgcttactggtatactccttcctggcattgtaggatctggatgtggaggtctccttcccccaggtgtataggaggcccttcctttgtgttccctgcagtcctcaacatgaagctgggcccatggagcccaatccccacaggctgatggcattgagcaccctggcctcactctgtttctcctctgttcctgagcctcccacccaggaaacacacccactgctgactccatgtcccagtaccccagccacacatggcttctctgtgggcggcttcaggcaaagcttctgtctctcctcacccgctctgcacttcctgccctgcaggcagagggagctcccttcattgacgggtggccatgggcagggtgatatgtttgagaagcagtgaatcctgtagctgaaaggaaccatggggccacttaggtcagtagttcccaggccctggtgcttttcagaagtggggaccttgttagaagtcaagatccccaggtcctccccaggatcttctgacctagcaggtctggagtgggggccaggaggctgcatttttaaccagtaccccaaaatatctgtaggtagttgtaggagaaccgaagtttgggatccactcatatactccaacgtcttcattatgtggatgagaaaaatcagactcacagaggctgtgtcacctacccaaggtcacccagcttgataatgatgaaactaaaattagaacccaagattcctggcttccaagatgatgctcttactgccacagcttgctccttgcccttgctatgtttccagagggagaaaaaacataagaggcaatatggaatccagtaatccaaatgtgctctgtgctgagaggtcggtagaacatgatagttaagacgccagcctggtaccaggcagaccttggttccaaccctgtaaaatgagaataatgatgatacccacctcccagggttgttgtgagatcatctacataaaacattaaacacaggacctggcatgcagcaagaactaggggtcaagggtttggcctgtatgagagggattcaggcccagttacttcattcccctgatgttatggcaatggaggagtcccccaagcaggtggaggtacagctgccattgcattgctctgcagtaaagagtcttcaatgtagggacctcctgggcactgtgagccctggtgttccaaaccccaagattcccattccctcacctaccacaaaattcatattcatctgggagaaccaactcaaggctcagcccaaccctgccaaggtcaccagaggataaggccgtgaatcacttttcccacaacttcccttttaagggcaggtccccagcttttattgtactctgttttatatcattataattgtgctgatcagcaaggagaacagacccatttttacaagggaaaggagacacccacaaaaaaaagccaaaattatgacagtttaaagcttgcagcaaacactttttaaattagatctgccttcagtatgggtgtcagacagtttcagagcagagcctgatttggaggagaggcgagttagcccttttagggggcatgtggtcggcaaagaggccaggagcagttattgggaatgaaagtcacttacttacaagaaaggaagtggatggagggtgacgttcttcgcattgctggtgccctggtgctcaccatgatgccaggtgggctttcaatgcctggagaggggagatgaccatcctgatcatcagcctcaaagacctacctctgactgacctggggaaagggacttgattttctggggttcagcttctttttctctgggagtctgaccctctcctcccacctgccccactctcttgctaccttggggattagtggccggggctaagggagttggagcaaggccaggcctgggagacacaggtgcaagtccagataatggtgcaatcatctgttctggatgatggatcagaaaaggcataagtgcaatcttctttttaaaaaatggagtgtgtaaataagcatcattaccacattactgatagtatttggttctgtggccttgagcaggtccttccccctctttgtgctatactgtcttcatctgaacaactaaagccctggaccagatgaacttccatatcccttccagctagaatgcttgctgtgcaccacaaagcctgttagtcttctgctgccttccaggtgaaccaccaggaaggaattggagactgaagagggcaaacaaagcagacactgaggctgtgatgaggggaagtcttcctttagagactaaccctgtgccacttaggcagcgacagtccccttccacagcaacccatgccagaggagcctcgctgctggaatgaggttcctgttccacgcgtttgacgtgtgtgctgatgactctgcaccatatggtaagggtgtccaggctgctgctggtgggtattttatttccttgcctgttggttttaaggaggctgtatagatgctgccctgtgcccatctcagcacaggaagcagagctgagcagcagagatgaaaggcatacagaggccaaggaggcatccatcctggtgtagctgatgtgcttggggccacaggtggtcctactcaggggcagtccctcttgtggggccgcagacctggagcagtcttagcctgggtaagcccaggtgcaggagagaggagggaggtttggctaagacaatagaagccctgcagtgccctggacccatgcctgctttgataaatagcccttctctgcctccattcatctatccacccatccattcatccacccattcactcacgcattcattcattcatccattcacccacccatttatccatgtacttctttgctttcttctcactcatgaatgtgaggatacctcatggcatcaagtgctgttggtcatcaaaaggaccttggaggagatgtgctctaactctctgaggctcagtccctccattgcctacagacagcccttccttcttgggaaactccaagtctggaagttctttcttgagacaagatcggcctccgtctcgttcccactgcttagtcctgccgacttccttctcctttccagagccacatggaccaagcctgatcatttcaagggacagccgttgagcccagtgtttctccaagtgtggaatgggcccttcgcatggctggggagacaatttggggcagtacatggacattttaaatagttatttttactgttacccttatcatagcaagcaataatagtggtgatttttaaaaaaagttccctttccagatttttatgtaagaaaaaagtgagttgatttaatgaaaaaatgaggaaaaacgctatgcatacatggacatggcaagggctccaatggtcccgggggatgctgcactggggagtctcacctgcgctcccttcctgcacccgctccctctgttcccctcacttcacactgttctttgattgtggatatcacataactatctgtataggttgtttgtcaagcccacctgtcaggcctgaccccccgtctgtaatccccacatacatctccacggggaggccatcacatctcttcatcatgtcatatctgaagtgagcttctcagacaccctggaattctagaaccactaggggttggggaaagggacatttcttaagtatttcctatttaatgtgttcagttcacatcttccctttagtcctaaaagagtctctgcaacaagatattctctccattttacaaccaaagaaatggagacacaggaaggttaaaccatctgtccaagctgcaatagttgtggaagagctaaaattctaaacttgatttgtctccttccagcgccgtggacgtcccactacactgggatgccttctagctgcatgcacgaaggggagtggggattatccagccaaattcacttttgtggataaagaaactgcggtctggcaagtttgcatggcatgtccaagtcccctggggtcactggccagcccacactttggactctgttttctgtgagcctttcattcttccagccgttctgaatgaagtctgaaggccacgtttgatagtccccgtcaggccgtaacattttctcactctgtcttttctcttcctcttctccctctctttgattcagactgtcattacctccttcctggaccacggcagaggtctccccacttcagtctagttcatctaaagattgcttttcatatttatttcctaaaacatagcttggcacatatcaccctttgatcgtgaaccgtcgtcagcccaagtcaacgtggatgttaggtcccagatacaacatcctgggtagggagtgtagactcttcctgcgatcctggaggctggctggagtttagacctcacctgcctgggcagaggctttcccccaccgtgcagacactccagcaaacaggggctgctgcttgtttcccctgaggatcttgtgtttctcatgtggaggtcaccgaccttgaccaggaccccattgtgcagctcctcccctgccaccttcaggcctcgctgccaccacacatcctgaccaccagccccagcaatcgccttttctccaaatccttaaactgccgattaccagcagggctcatgtggcaggttgcacacacaatctgtgttgtaatttgtccatggcatgtgtccttcctgcccacttgcctggactgtgcaccccaaaggcaggggaagcatctcctgccctttgtaactgcagtcctttgtcccagtgctctcagggtgggccctcggcacaggccgtccgtgttgaggatactaaggtgtcctggtgggtgctgctcatttgaattcacatggtccgggcagggggaagggttgcccgggaagaagggtggcctctgcagcacccctggagttgcaccccgagtgctgggagacaggcagcctgagaggtgaaagcatgttgtcaaccatgacatgctgcaggcactggagggaggccgtggctgggacatcgaccttgatggcattcagtgcccttcaacttctactctggaggactctgtgagcctctagtgcccggcactatacaatgcactgtggatagcacaggaaaatctgccctcagagtgctcctgctcctgaagcaggagcgaggtcttgcacgcttgctgaatgggacagcctggaaagcaggccgtcgtgccatgtaccaacatcccaaacgagcagtggacagactggccaggaggctgcagaaccacaggaaaaggagaccgagaggctgggcaagccaaagcaccctcccaggggaggagaagtccagctggcctggctgtgagagcttcccaggcaaggggctgcaggggcagtgatggagatgggtggtcagggaggcaacttctccaccggagcagtgagagttgggagaagacaagatatggaggtggggaaggaaggatttaagcagagaagctgggtcctgatgaactactaattgggaatccttataagttcttgagttagggaagtggcatgttcaaagtgagactctggaaagttccttgtcagaaattcactgctcagaaattccttcatcccttgaaggtaggaagaagccaccactaggcggggaaatattgggtctgcatccctgtgtcctccagctgtagatctgaggctgttgaaggggcctcttctccgcctcctcaccccggcctctctaagagctgtaacgttactgcctccctcccacagcctcatcctctgctccatagctctgtgctgtaacaagaggctaagcacagaattacatgggctacccttggctgggggtttgggctgatggctgtagatctagtctgagaccataatttgaactaagcatctcccacacaggctgggagctaacagggaggcagagcagcatttgtcttccagtgtctgcacgctactgccttttccacccaggcaggactaagttgagctttaatatgcccaaatggctgataaggggtggaagcactgggcaccgttgcagagacatcagatgagcccatcaatagagctgctttcagaagcaagtactagaaaactcaactcggaatgactttcacaataaggaaattttatctcacatacaggaagccccaaattaaggtggcactgaagttggttcaactgcttcccccaggacctcagtttttcccaccttttctctttgcccaccctcagcatgttgctcttgtcatcaattagctgtcctcatggtccccagatggctgccacagttccagacttcacatatagacatggatgtttcccattcaacgagagatcatagtgcttttgtgctggtatgcctctctgtctttctgaatcaatgagaaaatttcccttcatgccacactggcagggttgggtctcaggccacttctgaagctaatggatggagaagagaaaaggaataaagtcagctttagctgggttacaccagtggtgggttcatagccagtggtgctcctcataaggtggtgaccaggtctgacaggcagtgggaagaaagtgtgtggtaggggaagagtggggaggcctgtgcagcagccagcacatgactcaaaaatcaggcattcagtgtagccccaacaaagccccaacacacttcccattctgacaattgtgccaggtaaagggggttctgaggtggctgggaggtgagctgatggagtccagctttccctctaatcacaaacaatgggaaaaaaacattaaactcaacattctggctctaccacctactagcagtaaggctttgtggaagattatctaagccctctgatctgtttgctcatctctatattggagatagtttttacccatcatgcagagttactgttaggattagaacagaaatgtccaggctccgactgttgctaatggcagctatggtggaggtgatgatggtggagataggggaggtggaaatggtggtaatggtgatgatgggggaggtggtgttggtggtggcaatgatggtaatggtagaggtagtttggatggtggtaatggggatggtggtaatggtgatagtggagatggtagaggtggtgatggtggtggtggggatggtgatgatggtggtggtggtaatggtggtggtaatgatggtggtgatgatggtggtgatggtggtggtaatggtggtggcggtggtgatgatggtgatagtagaggtagtagagatggtagtggtggtggcagtggagtggtggtggtggtgatggttgggatggtggtgataatgatggtgatgatggtggtggtggtggtaatggtagcggtatgatggtagtggtggtgagggtggtggtggtaatgatggtggtgatgatggtagtgatggtggtaatggtggtggcagtggtgatgatagtgatagtagaggtagtagtagggatggtggtaatggtgatagtggggatggtagtggtggtggtggtggggatggtgggataatgacggcgatggtgatggtggtggtggtggtggttgtgatggtggggatggtgatgataatgatggtgatggtggtggtggtaatgatagtggtaatgatggtggtggtggtggtggtggttgtggtgatggtggggatggtgatgataatgatgatggtggtggtaatgatggtggtggtggtgatggtggtcatggtagtcatggtggtggtggtgatggcggaaggaggtgatgttggaggtggacatggcaggcagatggggattgagaagtccagagcagggtggccactgagctgcatcgtggaggagtaggagttcttggaagtggagaaagtggcagggatgggaagggcatgaagaagaaagctgccggaaacagcctgcctggtttgggtgtggtgagcctttggtgtggctggagcacagaatgtggctggggaacggggagggtcagactgtgacagaccttgaaccatgctaaggaggctagatcccatttaagggcagaagggagccattgaaggctttcgagcagtaaaactccctaggtgtcaatgagcctggttaggaagctcttttaatatccaaacaacccatgatgggggcctgagtggggagaggccatggggtgaggcagaaagacaggatcctgttccctgggccaggtgttggtctaactcctgaaagaaggtgggcagttagtagagagttttaaggccactgctgcactttttccccatttgggaaattacatgctagcccacaggtcactaagcaaatgcccattgtccccaggagtaattcagccctgattggtaatatctgtcaccctctccactccattgcccccaaagaagaggtaatcaccatgagcacagtgagctccttggagagtttggggctgtggccacgctctgacacacagctgcccaatgacagaacaagtagccttatgaggacctgacagccctgggatagaggaggtcagtggagaaggggcttctgccctgggcaggtggctggcctgggtggcatttgggcttcctctcaactccaagagggtgacacaggcagcattgtggcaaaggttgatcatgccctctgtactgttcaaacgctggacaccaggcaaatcaaatgccccatgcctgccctgtaggttgcagttggaaaaacgtgggccataaggaggccactggggtgtgcaaatctaccgcattggcttctcatccccagacctgcctgtgagaggtcagcacaggcacatgtcttggctggggcagtggaagtgaagagcccaagaggcgtgcacagggctagtgtcagacaacgaggcagctttcagcaccctggatctgagcacccacacccacgtgctggggcagggaggcaagtcaggcccacacccatgtgctggggcagggaggaaagcatactcgcaagaaactgataggcaactaagccatttcaacttaacatcctgggcaactacagagaaagagataagtttgagaagggtttttttttttttaattgagctactgtaaaagcaatgaaactagcatactttttaattcacccagcctcaattgctgcttgccctcaataaataggtgcattgttctcttcaaggctgctttgctgttaggctattagtggttttccctgtccttctgctttacaagaatgtcctgagtgtaagcccagaccgttcggagcagcaggcaccttctagcagaggctgctgcagaagacccccggcaggacctgccctcaggattgtgaaatcacagcattgccccacctccctgcccagcccttcttcccagtctaggctcaccctgcgcatctgtccgctggcccactacaaaaggctgtgctgtcaaacatttaagatccaaaagaatgcttctttttttattgtggtaaaatatatataacacaatttaccattctaaccatttttaagtgtgaaattcagtggcattaatcacacccacaatgttgtgcaaccatcaccaccatttccgaagtttttcatctccacaaacaggaactctgtacctgttaagcagtaattcccattgctccttcccccagcccctcgtaacccgtaatctactgtgtgtctctgtgaatttgcctactctagatctttcatgtaagtgggatcatacggtatttgtcctactgtgtctggcttcttttgcttagcacagtgttttcacggctcgtccatgctgtagcatgtgtgggaatgtgtaggcaccacattttgtttatccatttctgtcagtggaaggaaggcttcttcatggctgaatctcaggcataggtggagatcccaggaggaggaggccttcagtgtgggaggcctgctgcccacccctccagccatacctggcaagcaggcttttacctgcccagcagctcctgttgggcacagtaacccaggggtttcagacagtccatggatagagacggccgtgcttcagcagaaggaatgtcagaccagccatggagaaactctcatgcccctcacataggcaagacatgtgtccttgaatcagccccctcacctccatatcccaaggagtttgggatgggtgtcctggtttttctcccagcctcttacattctccaactcatcgatgcgctgagagggcaatgcggcaagtggagcaaagtgctgcaactctcaggaagtatttgtggcgtgctggatgaatacatgggagaagaatgaggtagtgagagctaagaggttgtgcatccttcatctctcagacagagaataggcaggaaatgcatgtagaggtcgggctgatgagtattcaagttctgaaacaacctgagatacagcgtgctgcttgaggtgttattattgtgttgattgtcttttgcaccttgtactgagatggaattgcataactgggcttctcatcaattctgtttggtggagaattcttgctggcttccataagtacatttacataaatctaggtgggcacacacaagctgtcttggtatgagttctcacaccctgggtctgtcacctagtggatgtagccacacagtgttcagcacaggtgggtgagcatcccccagctctactgtgcacatgggagtagacacttcagtcagtctctccagactgtcctggtcccaagagatctaccctggcatggcttctgctcacaaggagtctgtgttcctctaaagcacaaatattaataatctcattaatggagggtgttttgttataaagtctctttgtattcatggtgatcctcagaacaacaaggagaggaagtgaagaagaggagctctttattccgtcccatgtcctaaaatctcactgtgcctttggcagaaatgcacacaaaccagggcctggcggtctccctcgccatagcatcttggagggactttggaagttagctaccgctttggaagtggtattcaaagttccaagaaaaacgaaaaaaacactgatccctcttttcaaatcttatgcagaacctggcacataaagccagtaaaattcttccggactggtcagtaataggtagctgctgctgctttttgtgtgtattctctgtccacactctgtcatattggctccctggaccctcttcaactgtgttaggacccttcgacactcagcatgtgggattatggcattgctctggttcaagaggggatggggagtcaaagcctccttacttagccttcctcttgcctgcacctgtcccgaagccctctgtggaggcctagagctctttgcagcactgtaattttcttacgtccttttgcacatgagaaaatagacccagagaagtagagtgacttgtccaaggatgtgcagccagttggtgccagaatcaaaattattaccatcattcaaagacttctcatcagtaaagactcatcattattattctcattcttgagtctttgtcctcaagaagcttataatgtagttgaaaagagtggtaatatatacgtgagaagataaattggaaaactaggatagcctgtacacatcagtgtctaattagctccacaagtgtttagaagccatcatgattcctggaactggggctctctctccactgacctcttctaaatatttcagacatgagtgtggccatggaccccccagttgccagtaggagatctaagaaatgaacagggagagaaggaagaaagggagaagaagatggaaataggaagcaataaaggaaaaatggaattgaagagaaagtggtagaaaggaagaagacaggagctatctgtgggcaaggtcatcagcctgcctcaaggctggcagggatccacccactgtcagaggagcagggtcctccaggagcaccggggaatcccttccagcctgtattgggccgttgttgcagtgctataaagaactgcctgagactgggtaatgtataagaaaagaggtttaattggctcatggttctgtgggctgtacaggaagcatagtgccatctgcttctggggaggcctcaggaggcttccaatcatggcagaaggcaaagggggagcaggcacatcacatgatgagaacagagcaagagagagaatggagcagggaggtgccacacatttttaaatgatcagatcttacaggaatgcagagagctcacttatctccaaggggatgggctaagcctttcatgagggatccatcctcatcacccaaacacctccaaccctagggattacaattgaacatgagatctaggtgaagttatgctcaaacgatattctgctcttgccttctcccaaatctcatgtcctcatgttgcaaaatacaatcatcccttctccatggtccccccaaagtcttaagtcattcagcattaactcaaaagtccaaagactcatctgaagtagcagggctggagggcccggtaggagcaagatggaaggcaaatcccttccacctatgggcctgtaaaatcaaaagcaagttagttacttacaagatacaatgggaatataggcattgggtaaactttcctgttccaaaagggagaaattggtcaaaagaaaggggtcacagtccccaggcaagttcaaaacccagtagggcagtcattaaagagccagaatgatctgctatgattccgtgtcccacatccagggcacactggtgtgaggggtgggctcccaaggccttgggtatggcccatttgcagctttgaaagtctgggtgtttccatgctattggtctggggttcattctctcttctgcagttgttcgtacctcctctacactatccaaccttaacactgaacagtaggaatgggagtcttcatctgttccacttggcttccaaagcttcccgtttcccaagatcaccaaaagggccagtttgcatgctgaatatttggtgccttctcaatgagctctgtgaccacccaggatttaggagggcacacaggcctctggcttcagagttcaggcatgaagagggccacggaactgtatattcaaggaaccagaggcacgtggggcatctatgagaacagtctttgaccaactttttcttttcttcactccattcatactcgcccttagatgtttctatgacagcacaacgtatgttttgaaggaattaaccaagctgtcttgcttgtttttgttttttgttgttttttttaaagtaattctagaagggcagtcatgcctctaaggtcagagtgaataacactgcttcttgcaacatttagtcagcacacgcacacacacagtgcacacaaatgctacacagtgaccgtgtcccagacgtttcaacaataggcagctgtctttctctggattcctgttcagacccgctcttactggctctctgggcccttccagttctatctcagacccttaaacaatcaggcatgaggattgtgaaaccagccatgtctctggggataagtggtaccagtgaactgcgtttctccagtaccccggcaggtgagatgtgatgaacagacctttggcttgaaggtcagaaagtctggtttcctgtcctctgtgcatttctccctggcttgagtatcttgtcagaatcctaatttttcaggtgaggaggttaattagataacctttaagtttctttctctcccagacttcatgattttaagagaggtcctgtaacttctgctggagataaattcgcataatgtgaagggactttcttggggatgaggtttctgatgggatgcacatgctaatgggggtttgtagtggctgttccgtactgatttggagcccagcctctgcccttttctctttagtctgcacactctcctcgttcagccgtctcctgcaagatgaactctgctctgggccccacctctgtaggtctgatccccaatatctccacttcagcaagttcataactgatgtctctaccttcctccaaaacccctcttcctcttcttgaagtcccctgctgcagtgagaggcatcaccatccacacagtcacccaaattagaaacctcagggagggggcattgcacatctctgcactgcctcttccctcaacccctacgtacaaccagaaaacaaagcacatgctttctcctctcaaatccacctacatctcaccaatcccactatctctactttggctcccgcctccatgatctctgcatgggtcactcccctgcccttaaccctatcactcattctccagccagtgccagattgcagggcgtatctcaccaggtcattcccattctcctcagaatggaatccaagcatccaggcatagccacaaagttcctggtcatcttgctcctgccgggccctccagccctgctacttcaacaccctcactccagccaaatcaaatgtttgcatagcagagctgtccatacttcccatcttcttagttcactctccacctgcaatgcctgaccccctccacattccctactccctacccccagcacctaaccttcttcacctggacaactcttcatccttcgagattcagcttgaagattcttactttgggaagtccatccatagccagctgtgcttgcctccggaatgccatgccatgtcctaattgtattggaatcatctgtccatttgccctgcattgtaccagtacatccttgaggtctgtttctgagactttttcctcaagtctccagcacccaacacttacataaacatgtttgtgaatgcttgagttaatgttggattgaatgatcactgtcaggtgggacaggtccctctgggtctccacatgttctatgccaggatgcaggacaaatgttacatggcatggatcgcaggataggctttttttgggaaaatttgccaaggccaaaggtcaacaagagaagtcacatcccccaacccttccatctcaaaaagagatatgccaggtccaggatgctgctggccctgcagtaaacctgtacccaagtggagggccctcaccacaccccgcgacccatggctctctctttttatagggcaattaagcaagagaaagcagcctgtcaatgaggaaataagcagactgcttggtaccaggcagtctggactaggggtgccagctgcttataggagttgtctgggaatgccagtttcccagcatatagggccctcagagccttcaggatattgctgctctctctgccagagggaggagtggttctgtgcttgagtgctacctcttctggagggctcattatctagacaacccagagggagatacagggtcactttttgacaatgcaactagttgtgccacactgatcatgaatgactaaggggacagatgggtggatggatgggtgggtaagtgggtggatggtgggtgagtggatgagtagatggatgatcagatagaagaatgagtgagtgggtgaacgaatgaatgggtagatggatagatggatggataaatgtataggtaggtaggtggatggatggatggatggatatatgtaggtgggtgggtggatggatggatggatggatggatggatggatgggtaggtgggtggatagatggatagctgaataaatggataggtgggtggatggatggatgggtgagtgggtggatgtatagatgggtggttggatggtgggtgggtatatatatgtatgtatgtgtgtgggtgggtggatggatggatggatggatgggtggatggataggtgggtgggtggatggatgagtgggtggttggatggatagaagaatgggtgagtgggtgggtgggtgggtggactgacggatgggtgcgtcagtgggtggatggatggatggatggacaggtaggtgaatgggtagatgaatggatgagtgggtggtgcataggtgggtgaatggatggatggatgaatgggtgggtggctggctggataggtggtgagtgggtgggtaggtggatagatgaatggatgggtgatgggtagaaagatagatgaatggatgggtgaatgggtggatagatggattgatgggtggatggacaggtgggtgaatggatggatgaatggatgagtagtgagtgggtgggtgggtgaatggatgaatggatgggtgagtgcatgaaaagatggatgaatagatgggtgaatgggtacatggatggatgaatggatgaattggtgggtgggtggatggatggatgggtgggcaggtgatggtgaatggaagtgtgaaagcaactagcacatatgaaagcacctgacacctaatggatacccaacttgtgtgtttccctttcctgtgctttctttcccatctcagcttcacctttctgggaatatagaaagaggtgaccctgtcatctagtggcagacatgaaagctctgaaccatcatgggttggggataaggagatgggctaaggggctgtgtgacagctccactattcccactcccacaaacatcctcaggttcccctgtgctgtgttgtctcatgttttcttcttcaacattgccctgatgtacattttaacccaacatcacctgactttaaaagattggagcttcccacgtcctgtgatttgtttgtggttcacaaccccaaggcagctgcctccctaaaccaattttatggcacaaaaatgggcaggaagggaaggacgaatctgcctctgagatgctgatgaaatctgacccctgcactcctttcccacgccgcggcgtgatctgggccttcatccacacgtgagctggtggttcttccgggtacctcagaaacacctggaaattgtctacgatgcacatttccaagcttcatagccagatgatctgtttcagtaggtctgggtagggcccagaattctacagtttttaattttgcatcctcaaactgcttcacagtgaggctggcactccctacatgcccaggggattgtgatggaatgaatgggagcccagggtactgatatggcctgatggctccctgcagagcttcccatctggccctgctcccgatggccctgccttggaggaaccttccagctggctaggcaggaggaggtgggcctttgtgggcaacatccctcctccagaatgtgggtgagcctggaacaccccctcaccactgctcccacatgcacacaccagagctccctctgactcgcagaggaggggaaaatgggtctaggggttctgagccgagtgcccacttggggctgtggacaggcccgccgcactctggagggcctatgcccgaatgcaatgtggatgggtgtttcgtggctccagtgagggatggctgaggcttctgcagaggcgagcagtggagcatgaaggcatccaggcagcctttgcctggtgggggccattaaggctctgcacttgggatgggggtgtgggagaaagcaattagtggcgagggacgtgcatgaatcagcacagagtcggctggctctaattgagccaacaagtttgtcctgttcgctctgggctcccagggatgggagctgcatccttaaatgcaaagcccttcttcaaggtggcaggggaggaagaagattgtcttctgccccttgaggaaagagaggggctctttccattctccactcccacccagtgcctgcctccatccgcaaagtgctgattttctctgctgaaatgttcgacgtctttggacagaaggttttattttctcaagaaagagatttcacatttctggatcggtgtatgtgagcaggttgcctctgtctgggctgctcttaagggatcttcaccgtctccatttctttgtggctgcatttttgctctgtcttttggaggaactcggctagtaccctccccaagaccaagtctgctgtcttcagggcttgttcctgcagaatcggagcgcggttttccaggagctgtgctttatccccttctcttttggccctgacattgtttccctttagatggagacactatgaattctcttctgggagagcacaataaaatgtcaactgattaactaaataaaatgtttcaaaaaatatgaaatttttccactagtctaatatttacatgttcatgggggaactttgatgcagaaaaaaaaaaatcctgtaatccccagtagcttggtgctgtcgcggtagagcaggtcgtggagttgctaatttggcctgggtgtccccacttggttccaccacagagggggcagcattatcttccacctacttgtgagatctactggttccaaactttccaaatccccaaaccaatgacttatttttctctcttttctatttctgtttcctaggaacgagtggaatatctctttctcataatttttacggtggaagcgtttttaaaagtaatcgcctatggactcctctttcaccccaatgcctacctccgcaacggctggaacctactagattttataattgtggttgtggggtaagtatcactgtctgtttctttccctttatcttaccagtgttgcgggacttttccttaagtcagctgaagacagggtcgttgtcagacggccacaaagatttaggctcgcagatgatctagagtgagaaaaatgagatttattttgctaaaaggaacagaaagggaaagagagactcagcaaagtgagagagtgcgcttcctgcccatgggcttcccgcctcgcaggttgaatccaaggttctacccaggaaaaggaggggtcaggcttctccctgctgcagttggtggcgtgaacttccgtggttccaccctagtgtgcactcctcccagtgcgcaggctggctggagtttctctggggacccctccccacctggctgtctcaccagtacatccctcttcttccttctgtgttatctcttttcaatttggtcctaactatgctgggcttcaggcaagaagaaaggatctgtgaaaatcactttgaattcagacttccccagagggacaggggctatgacccaagagcacccctctccaccactcccacacagcatgcacacacggttggacctgagtgctcctgatggaacccaggctgctctgtgctgctgtaggatatccccctgcttaaggactttcgtttcatctcagaccacatctggccccgcagttcctctgatagtttccctgctgtatcactgagcacatttggggcagctcgtccgtgagcatgcagtctgcaggtgtggggtgagggtggggcgcacacaggctgtgcctgtgctctggacttgtacagaggcctcttccccattctcactctacagggggcctggttctgtggccccagaaaaccagactgctcaagacaggtggatgagaaggaaacagggaactatgaaaggcgaagatgacaggtaaccaaaccccaatcaaatgcagcttcccccagacaccctgctccactgtagcataagataaggtagagtcagtctaggctttcaaaacagcaatgcaaagaatcttaaataaaatgtagaagagatctccttataaataagttattaacctcacaaaaagaatctccataaaatatttgtacctaacaggcctacctacactggtgaagtgtaagttattaaaatgcaggtgaggtcaggcgcggtggctcacacctgtaatcccagcactttgggaggccaaggcgggcggatcacgaggtcaggagatcgagaccatcctggctaacacggtgaaaccccgtctctactaaaaatacaaaaacttagccgggcgaggtggcgggcgcctgtagtcccagctactcgggaggctgaggcaggagaatggcgtgaacccgggaggcggagcttacagtgagccgagatcatgccactgcactccagcctgggcaacagagcgagactccatctcaaaaaaaaaaaaaaaaaaaaaaaaacgcaggtgatgaagttccatcaacacatctgtcttgtaataggagggagcccattgcagcagattttaccttgagaagaagccggttcctttgggctaatcccttgttactctgagcccagtgagtgctcaagtggctgccaccttggactctccctctcttgaagtcctggcagtctgcagagtcaaggtcagaatgtcaggagctctttatcccagaggcctatttttggaggatccttttgtgccatcccggaggagacacagccattgtggacgtctccagagcacccgccgttcaccatcttgtgagagtgcctggtctttactgcaggaaatgacgcaggaggacgtcgagatcatttgcaagttatttccttgtctctggccatctggatggctcataaggttgcttggaaccacgttagggtttttgttgttgttgttgttgccttattttgcctggccaatgaatgacgcactttggccacatgaacctcaggaatatttgggtgatacgaggtgcactaaggttattagcatcattagccaggtctagctctggctcatagcactcggggtgtgcatgcagctataggagagattttgctgcttctgctcatgccagaataaacaaagagtggctaaacgcatgccttgaatgactcagtaaaccatagcaaaagtccttaaggtgggttgttccaaatgcccctaaatcctttttagaatttggcatctttctcaaggcctcagtctcctgggagtcttttgcacatgcatagaaaagagccttgggaatgatgagagcagatgcttctgggaccagtggagggatgagggtgacttgcagggacgaattttgtttaggcaaaattttggaattttgaagtgagttggagttgattatatgtgctttgccccatatgtggtcttaatgaaatcatgagtcgggggagcagagacaagaaatacagggtgagtaggcaccgaacaggagccctgggagggaggggccctgcctgggttgacagggaggcagtgcagtggtgcatctctggcccacacctggtgcctcacctgcggtctgtctggacccgcttcatcccttagactcctccacacaaccacaaggggccaggctttttctggggtcagcccagattccagtcacatctccctagggcctaggccatgaggctggtgaagagagggaggcatccagttgtgtgctcctgtttctaagccacagaggttaagatgccagcagttgcccagctcgtggttggtcttgcactgggacatatttggcacctagtctctcttctcctaagggctcttcatcctgtctaaatcagcccattcttgtaacaatcccccatcgctgcagggtgcagcttaccacctctcttcagctcatctcctttttctgcttcctttgcaatattaaatgggtagccctttgcttccctgtgtctcttggaaaatatctgctatccttggcccctcttctgtagctgtaggggaaggtttctcctggcctcccacaaagctgggggagcctaactcaccctagagaaaggtggacctgcctgcctactgcctgagtgccaggctgagagcctcatctctgcattgctattctggtggcacaagacacgtggcatttctttccttcctaaagcagaggcctcttggtggtgggattgctgaataaacacagagggactgtggcggcctcagatccacgtgcccctaccgagggaccgtggaatcctcagtggatcctcaggaggttccacgccagccagtgaggctttgttgcatccctacctccctagcagggtggaggccctgcctttcccattctctgggcctcacgatcattccacagcctcacggtccttttcttctaaaagctccactgccggactacagatctgccagacacagctcccagagcagtccttcggccaggcgtccacaccagagcccaaccctcagggaccagtgggcaccaagcagtggttttgcctttagaatgtctcattgaggagaaatacaccagccactcctacacccatgtttgaattttctaccctttcagaattaaaagcggatacttaataaagagtctcaacttgaggcaggagttaaaggcaagttgtctaatctccactcccttcaccgaatagtattttgtgaacctcttttactccgatcagcatattactttcctgcaggaaatactgggaacaaaatctggtttgcatttggaatgttgtttgacaaatttgcaaactggtctccatttcctcaggtttcagtgatctaggcttcagtggaaagaacatttcccttgtggagaaagaagcccactcccccatcctggcaacttctgcctgggattcaaggcctcaccagctaacataggaagccatcaagttgccaggctgagagacactgcagatacggcctggacagggttctcaaacttcgttcggctgcagaacccactgttgagagtctcgctcagaggtccaagacacagaccagatagaagggaagctcctctggactagaggagccagaacgccagtcacgcagccagtctgtgcctgggggcctccatggagcgtttctagaccaatcccctcatcgctcagccctgcctggccctgaacttctgctaatgcatctggctaatcccccagctgcagcttcccatttctagatccagatacctggggcataagtcacttaagagctcaagcctattgctcctgaatgaaagctgtcctggttcatagtttagatctgatatggagacccactcctaatacctgggctccctccttgatcccacgcccctctgttgaagaaacacgacccagcgtgtagtgcactctgtggcaatgaatctgtagcatcctctctgggtataaaggacagaaatcaccctgcacgcccttttccctatttttcttggttgccacgaaaagcccaaaattattgagtcatccctcatcacccggactcctgttcccatggggctttgtgcatcctctgatctaatccctcctttctcaccaccccgctgcagaaaccttcccactgtgccctcccatccccatagtccctcgcctgttcagggtcagccaacttttctgtaagggccggatgctggttttcatctttgcaagccatgcagtctctgttccagctactccaccctgcccagcagcaggacaagagtggcatctccatgagtgggtgtaactgaattccaacaaaactttgcaaaacaggtggcccagttctcagcttcctttctggtcacttcctgattctccctgagggtgcagctttctctgctgtctctcagcaggcagccacttcctctcccagaagcctccttccactgcaccaggttgccaggtctaagggggccctgccagctcctgatttctgctccactgcacccccacctccctggagccctccagttttgacatttgtgtcatcagatcctctatgccttacttctctttactgcagccttctgcagacctttgagtcacccctccttgtgccttgaggacaagggctcttggttcgctctacttcactccgacactcacttctccaccttcctgcagtagcttcttggttcttggatatctggcttctggggaacctatctcagtagtcccaatcccatggctatagccaatatccctgtcaccactgattaacacctcccccataatcccaaatctaacatcctaccctctaaccagcaccaccgtctttccggtcccctccctctctcaccctgactcccacgatcccttcgtcccaccgcactcttcatccctgccaccatgtccaccctccttccagccagctcagacgccatgtgccactgctgccctcactcacttgcatttatgctcagcattcttagtcttctgtctgtttatcttgcacacctggaaaaacaccaaccctaatcaagtccaaccagagatctgcttggtacctggaaagggtcaagaaatctgcaaagttgagcagactctcactttacactcatgacctccaacctcaaggaggccctcggtgacacctgagggccctcctgctttgtccgcactccattcacccttctgctttctgagctaattctttcagcacccgtgcctctctcgtcacacttcccgtctccttcccctttcacgttttcagctgatggcctcgttccccagttcccttagaaagatgcaatcagaagaaactttcatgtattcccacaaccacgcgtctatgctgacaatgcgccttctcactgaaccacgacccacggcgctgcccctgcacaggtggacgcccttcgcatgcacccatccccttcttgccagtgaaggagctccgtcccacacggccctgcccctgcacgggtggcaccctttctgtgcacccatccccttcttgccagtgaaggagctccgtccttccagcaatggttccctctcgcttctatgtcatcacattttctgcctctgttagatgattcccatcacatagaaaactgctgtcatatctcccattcagaaacaaaaccctcttgactccacgcccacttctagtaaccccctttttttctctgctcatttagagcaaaatttcccaaaagacttgtctatacggtagccacacgtggccattcagcacttgaaatgtggctaatctgcattgcaataataataattataagtataaaacatacagcatatttcaaagatttagtacaaaacaaggaatgacaaatgtctcatgaatgattttttatatttattacatgttgagatgataatattttggctatgtcgggtgaaataaaatctatgatcactgttaatttcacctgtttttactttttaatgtggctcctagcaaaggtaaattacacatgcagcccacacttgtggcttgcatcagatttctgttggccagggctgtctatcctcacggcctcccactcctcccatgctctcttgaacctatgtctgctgggtgtttgtccacatcactccaccaacacagatgccttcaaggtctggatggtcttggtgttgctaaacccagcggtcggtgtccagccatgtctctgcagcacgtgacaccaccgcctgttcactgaccgctctcttcatggggcgccgttctctccatgtccctgctctgcaagccatccctcatcagtctgttttgttgctttctcctctcttgacccctcaatgtgggagcactgcagggttgagtgctttcacatcctcaccttctgcactggcctcctaggtagtcacatacaatttgactttaaatatgaactatacaactgctgcgcttttgtctccagcttggacctccccactgacctccagacacagtagaaccaactcaagacatgcattcgatgtccaagcaacaactcaaacttcaagaagttctcagcagaacgcttaatgtccattccgccatatctcatcattcctgttgctcatgcccaaactgttggaatcttctctgattcccctctctttctcacacctcacatctagtccatcagccagtcccactaactttatcttaaggtaaatctggtatctaacttttcctcactacctctaacaccaccacttgttctgagccacccagtgtctcgcgcctggatgactgccgcagctggtctctggcctcgcccccgacaggggagtctcccacaacagcagaatgattcttttagacctgtagttagatcatgtcactctcctgctcaaagtcccccaatggcttctgtctcagagaggataccagcacccggtggggttccctatttcctctccgacttcctctcccacagttctcccctttccctgccctgctccagccacactggtcgctgctgttcctctaacgcacaccctgcccctcccttgggcccctggcttacctgcttcctctgcctggaacagtctccagatagtgaagtgggtcccgccctcacttcccataggcctctgctcaagtgtcacctgcagggagttctttgtgcagatttctcaggtgggaaggaaggcggccctcaccctgtctctgcagagcccctccccgctcctcctcctcagcactcatcactctaagctgcagtgtctgtttactgattgctcagtttattgtctgtctccctgctagaatgcaagttccatgaggggaagggctttgtccattttgctatagccccagtgtctggaacagtgcccggcacaccgcaggtgttcttgtttgttggaggagtgaatatgccagctcagacctaaagtggcagggctgaaagccctgtgtctcagttacgtgcacgtgtggttctaccccacttgagaccttcttgtttaaccactcaaccattcattcatttgcgcagcacgcacctcctgagcagccaccaaggccagcacaaaggagatttccatgggccaggaacaagtcaaagagggggggtatctagaaggaaggaggtggggaaacagagcacatggttgctggcacacctgggaggggcgctaggataccatggagaagccggagggctcctcaaggagataaggactggcaacagacttcacctgcttcccacgtttgtccagcgcttgtccagctcctgcctttatgacggcagagggcctgcccctcagctcgctcaggcctccctgggccatggtggcaccctgggcatggccaccacccacactgaggggatgtcagcttacaaccacccacagactccacgcacacccacaacgcccgcccctgggctggagacgcctgcgcaatctgcttttccgggctgtatccagaggtcagagccccagctgggcaaaagaaaacccagtcctgacagtccttctctctttcctctcttctaggctttttagtgcaattttagaacaagcaaccaaagcagatggggcaaacgctctcggagggaaaggggccggatttgatgtgaaggcgctgagggccttccgcgtgctgcgccccctgcggctggtgtccggagtcccaagtaagtgaagcccgttcttgtgtacagtgttatctcctcaccaccttctgctgtcctttgctgaattgccaagaacactctgcaaagggacctgattccatataaatggaggggtttttgtttttgttttaaaatgagttcctttgatctgaagagcccaactcggatgtaagtgccttaaaacacactgtggtcccagcgcctggaaactcctggagaaagttcacagcagtcactcagccacatgaatcctacataaaggaagtggccatctgagccaccctggaggccctgggatggggatttaaatacattttgtagcagaagagccaggtggctaatctccgaggctccagagcactttagccaatgagattatctctactttctgtgtttttccaaagaacaatcaggaaagcatcagtggatgttctaaaagttctgttttgacctttctcccagccctctcctcccttcctgtcaaatggggcagcccaggcctcaggagccctactggaaataccacgcctgtcattgtgagaacttatttttcccaaagagaggaggatattccgctctctgaatcaggggaagggtttggagaggtattgcctatccggatgtcagtcacatggacaatgcctcttctgccacttctccagaagcctggcccattatgggtgcaccccaggtactgaacacagtggcttcaggccccctgggaaggcgcaagcaaaccccagcccaaggtgctcctgggagctcagtccactttagaactcctttctactcttccctcttcagtttgtggtatctgagaacaattctggactcatttgcttaaattttgctttcagttcagctccagtagatttggcccatgactcaagacataggagacccctcagactaggctaggaccagatgagtttggagatggtgtaagggacaggaagacagaggacctccgaatgcacagcctctcctacccatggcatgcactgagcacttggttaccggtgtgctgctgggtggtatcatctggagtcatgaaaccgtggaaatgtgagggactttatattaaccagtttactttttgttcatgcacggaatagtgaaaagatcttcctgtgactttaattaactagcaatagagccaagactagaatcatgtctcctgatttctagaccagctctttcctgccatacagcactgcctcttttaaagaattaagtggtatatctctcttgattgtcttggattctttttctttcttttttttttttttttttttgagacagagtcacactctgtccccaggctggagtacagtggcacaatctcagctcactgcaacctccgcctcccaggttcaagcgattctcctgcctcagcctcctgagtacctgggactacaggtgcttgccaccatgcccagctaatttttgtttttttgtgtgtgtttttttttttttttttttgtatttttagtagagacggtgtttcaccatgttagctaggatggtttcaatctcctgacctcatgatctgcctgccttggcctcccaaagtgctgagattaccggcatgagccactgcgcccggccaattgtcttggatttttacacatatatcctgtctcttaaactacactataagccccttgaaacccagaactgtgccttctattgcctctgattcccacacaacataagcaaagggaacttactgaataagcaaaagaaagagtttgttttctttgcagtgggactccctgggcaaagcttgtggcctgtcttaggctcaaaaggcacgcagagctgagcacacaagcacaattaaagcagactttctctactcggccttaactgtctgggggtacttaggtatagaaactgcatatatcgtggccaggacccacttctttttgaagcctaaattatttgggttttcctggtcaatcagccagaactcaatagccaaaatcaggaagtaggaagggaggatgacagtgactttgaacatgactttaaggagcttgtaatggtaccgccagtgtgtcagtgatagcaactgggagttaattccagatgccagccaaccaagcgaaatggacacaatgaccccgacctgttatctatgtatttattaggggcctgcaatttttattaggggtattaggacgtatcataaagaacaagcatggtcctttcactagagaaatttgacagtctaagaaaagagtataacagtcagcttttgctgtggaaataaaccatctcaaactctgcatggcttacaaccagcaacatttacacctggctcatggcacctgagggtggtggtcagctgcagctcttctgcactcagctggactctgggcttgaccacattctgcgtgccatccaattctggagcccaggtcgaaggagccctcaccttcggtggtaggccttgtggttgtcatggctgggggaggtgctcacaaaatggggcttagagccaaaccgcactagcaacttaaggcttatgcttagatgtggcttctgtcttagctgttcacattccactggccaaagcgagtcacatggccaccctcaaagataatggggccaagaagtgtgctgtacctgcagagaagcatgggtgaacgattgagaacacatagcagcctaccacaaagagactgaggagatgattgttatcaacagctgtagctacagtaattgctctagtacagagattcttaattagagatgaatatggttgagagccactcatgctacagtgcattaaaaggaagaattagattagatcgggtcacttggtttccactacagaggaaatttcccgaggacggagccctgtctccatctgcacttaagtaaggtagacgtgtcttgtagtggtcaggaagcagtaacactcctaggaattctctcaagaggatgcaggcctcaaatgcaaggccctcatgttacctgccgtgcagtccaggaaaatattttcgccattagagatgatgacactgagatggatttgctgttgtgggtgccttgtaggtagctccatgcttatgcataggagcagcaacggtgtctggtttcctttgggtcaccagtaaaatggtggctcttcctcagctcatccagccttctgccctttcttgctggaatagtgtctgtgcagcttttgaaacagggaaccatgcagaccatggtggatcagtgcactgtaccagtgtggttggtgtcatctacaaagatgtcagcagtatctcccctgactacaaacctagacaaatgcctccgtcttctacttctcatagccataggttatctctttctgtatttcagcaaaactcctcaagagttgcctctacctgttgtctgtgattcttgtcctcccattctctcttgaatccactctgatggggctttcttccccactgctgcaccaaaacatctcctgtccagaccatcagtgatcaccgttaccgcacccagtgctctgtcctccagggccatgttacatgatctgttggcagctttggatacagctgatcgctccttgtctttgaaccaccgttgcccttggcccttggcacactgctctttcttagctctgcccttcattcacttgtttcttcttcttggaatcctttgctgacttctgtctcatcttctcaccctcttaacattgggaagctccaggggtagatcctgagacctctcctctgtctgtactcactccctagttatcacgtccagcctcctggtgttaaatataatctatgtatcttccagtaaccagcagctgtgtgtcaccagcccagaccttttttccaaacctcagacttgtatccctacctgccgactccgttcctctcctgtctgaatagataataagtatcttgcacttagcaagactcatggcagaactcacagtcttcccagagtctttctcagcttggtaaatgctagcctcatccttctagcttctcaggccttattggacttatttctttttctcactctttgattacaatccatcagaaaatcctatgagctttaccttccaaacatgtcaagaatttgtctcttaccacctgcacactcagctcagcgctggccgccctcgcctccgtcctggatgatggcgacagcctcctgcaggagtctctgcctcaacccctatcatggcccggacctaacacggcattcaaacggccctctgaacagccaagtcggatcatgttcctgccctgctcaggaccctccacggcttccctgacttgcccagagtgagcgccaaagtcccataggccctgcgatctcacgcctccttcctccctaagctcacccccttcaccctcccctcctctccctcctcaccagccctccacagtgactcccttgctattcctccaacattccaagctcaccccactgtggggtggtggccggcacttgctccttctgtctgaacgccctcggctcagctctctgcacaggcctgcgcacctccttggcccccacctcggctcagctctccatacaggcctgcacacttcctcggcaccccctcggctcagctctcatacaggcctgcgcacctcctcggcccgccccttggctcagctctctgcacaggcctgcgtacctcctcggcccccgctgatgccatcccctcactccccgttcatccacccttccctgctccatttccccacatcacctctcaccatctgccattctgtatgtgtatgtgttcatttgcttatcaccccttacctcatgagaatgtaacctacgtgaggctaacaatttttgttagttgtgttcacagctgtgtcctcagcaccgacaataaaggtgataaatatctgtagaatgagcaaacatggttacacggacgcccatggcggctggcatagcttcacatcacaggccctaagagccaccccacccactaaaatgatgtgagtggtgccagcttcctggacatgtgcctttgctggcttttccaaagggtctttacttcttctgtctcatttgatcttcatgacaattgggtgatattaagaaatgtacataggcaatatatagatatgtagggtttttcttacaacaaataggttcattgggccatttttgacatctgcaattctagaccaatagtgttagaggccccaaaagttgcattttttttttttttttttttgagacggagtcttgctctgtcgcccaggctggagtgcagtggtgtgatctcggctcactgtaagctccgcctcctgggttcacgccattctcctgcttcagcctcccgagtagctgggactataggcacccgccaccacgcccggctaatttttgtatttttagtagagacgggtttcaccggttagccaggatggtctcgatctcctgacctcgtgatctgcccgcctcagcctcccaaagtgctgggattacaggcgtgagccaccgcacccggcctaaaagttgcattttttaaatgcacatatatgtactaaatgtcattgaaatcttatgatcacaggttatggaaatagatgattgcgagggtacaagtccatgagtcatttatcaatttgttcaacaaaatcgactgagtacttactttatgtaagattttgttagccattatagcagatacagaagtgagtcagatgctaagtgtgttctagagagcttgaagtgtagtagaagaaaaaatattcataaaaatgattatataaataaaaattggagctgtcaaaaaggaaagtttaggtaagatgtgcaatgtgatgaattctgtgacaagccatgcattggggacaccatactttggggagtggtgatagagaatcaggagagccttcttggagaaggtagcatttgggatggaacttgaaggatgagtgaggagaggcattccaggaaatcacacaaaggaaggagagtggccgtggccctggagatgcacactgtgaggctgcaaggctaacggcttgattacactgcagaggtgaaaatcagattggctcttccaatggggttctgtgtagttgaaagatttggccatttggcttcatagagactcttctacagtaacagaatcagttctctctgctgtgagcatccactctcccactgcagccgtgctgtggagcatgcgtattacaccaaagactaagccatatggaggaatcaacgttatacagccagatgaaccatagggagagttgtggttaaatatttgcaatgtatatgcaaggagtacatttgcttgtgaagcagtaagcaaggggtcgtttcctgctttccatttcatctcatatgccttctggagaagaactttcaggagggacttgataaagggagaagtcaaatggagatgagaaagatgtgtagggtctttgacgaaaactcagagcaacctagacttgatctgatgatgaaaggaactgaaaaatcacctttctgtaagaccagcactagccttggaagacactcatcatgaatgtttattgagcactctctgtgagccaagcacaaagctaggtgcggggacagaggtagatagtgcactcccatcagtcaaatcagaacacctgtccagttttcataaggaccatccggttttagatctggacctcccagtccagacttgataagagaacatctttctagagcagatagtcaaaatcatgtaacttagtccctgaaactgacatattttggagttcagagaatatctccgaatcagagcagaggctcaagcccacactgcttcactctttatcctttgctttttccactgcctgtgtcctcatcgtcccagacttccctttaatcctggttaatgtgattttgatttagtcctaatggaatgctttaaggacttttcgtgggatacgtttttcctagtatgtgagtctttacaagattagatctttcaggatgtcccttttgtcagtaaaatgttatatctggaagcacacagaatagaaaacagctcgctattaaacggaagtttactttcatcctgagaggtgagaaggagcactgaggaccatgtgtggatagaggtcagaagcttcaatttttccttgctcaggtgaggactgtttcctgaaagcaaatcagcaccagttagtagacaaatatctgtggagtggataccatatagaaggcaaggaaagccttacaacatgctggttttgaacatgagttcttgaatcagactacttactggcttctgccacttactgactctgtacccttagggaagttgctaagcctctctgtgccttagtttcctcctatgtaaaatgggaattgtaatcgaacgtattacatatgctgttggaaagactaaatgagttaaggcacgcaaagcactttaatggtgtcctgcttatagtaagtgctcagttaagtggtagctgttacattatattatattacatatgtagactgaaatagaggacaagatcattctcaagagacaacaaatatactttaaaagataaggaatattcaagagttaaatagcagtttgagaccaaaaatcaccagagaggcatgtgtatgattatttgacttgcatagtgtagatgatgaaatggattcaaggggagagtttaccagggactgtggcagtctgaaaagttttatgaaggaggacataccggagataagccctgaggtttatgtggaacaggcagggatggggatggaaggacatctgagggtgaaaaccttgtttgtttaggtcaccaatgtgggccagtctcggccagcacataggtgtggggtgcccaaacccattaccgaaaaggaagtatgggtcgtgagagccaggagacaaaagtccgcagtgagcagactgagctgggtcttggatggcacaccaagaggcagttttctaaacagccactgctgttcactctccatacaaaacgttcaaaaaaaccgcactgcagagacagctaagtgtcttggaaatctacaaaagaaggtcagaactgaccatgaatcttgaattccagggaggttcacgaacccacccgggctggtggcagagctgaggtcagagccataccgaagctgtcaccgctctctcccaccctgcatgacctccatcccagaggccaggtctgggccatcctgctctgtcctgagcgccctgccagaagatcctatgctgcttgacaccaaacactcttttttaaaacattcttactgatacgatgaatattgacttaaaaattgctgctgcagaagttgaaaactcacctgagtgccaagtccccaggtgaaccacacgcatcccgagatgtagttttcctcccaggatgggttctcccctcctggggattagtcaccgtgaaactggccacactgattagcaagcggtgccagttaatcagacccactgagggcacattagggctgctaaaagcggcttttctgagtgttttcacactttgatggtttaaagccactcatgctgtcctgtctgaaatttgctgttggtaaattgagccacagcagatttgcaatcccatcgtggctcccaggaaagtgttttctggcccagttggtgccgcattgtgcaagagaggaggctaggcagcaggcatggtccctgcaaacagctcctgaacctcgcttgcagttaaggacacctcccagtctggactgataagagaacatctttctggagcagatattcaaaatcctgtaactcagcccctgaaactgacatatcttggagtcccagagaagatcccagagtcagggaagaggctcaaaccacagtgcttcactccccatcccttgctttttccactgcctgtgtcctcatgttcccagacttcctttaattctggttgatgtgatttaacactgaagtacccacaggatgctgctggtgcagctgagcacaagcctgggtaggcagaggacccagcctccagccctgcattcacccggacaagcctggagaccttgggcaggtctgccctccctctggactttgtcctgcatctggggcttgaagggcctggactggctggcctctgcatccccttccctctcccacatgctcatccccaccgcaccaggctgtaccctcactgcttgcagaccttcagcctctccacccctgttctcaccccctctcatgtccttggacttggccctcattctcccctcactttctattttgcttcctcttgctttttatcccctttgtcttataggggtcttacaggccacatacccttaaacaacatgaggggacacttacaaagctacttatgaggacaggggcatgtgcagggggccacccctgaggccgtccctcattctccttcacacagcgctggaggctgcctggtccccctgcccgcccatcggagatggtccctacaacatcttctaagccctttccctcccacttctttcactgccacaggaagtactcaaaccttgtccgctgtatgtgtctcatggcactgttcctgaatccgaatgtctgggtgggaggggactaggctagtacaactgagcttccattctgcagagaggagccctgaggccagagggccacatggcttccttaaggtcacagagtgacctggtggcaggtgggcaggacccttgcttcctgcacggtctgcaaggggactctgatggcaatggtgagggaaccctcagggctgctgatctttgctgcccccaggtctcccagcctccccagaagggaggaagccccaggacccgctccccgccttcccacccaggcagcctggggttgtgctctgcagatggggcagagcaccctggagggcagccagagacagcagggggtggcggggggcccttcacactgcaggaggcttgcctctaagaaacagaatttagaacagggtgggtcccacgcccagccccgccctgccccttagcacctgccaggcccaccctctcccccggtgtctcctgatctcccagtgtggacggtctttccccttgactgctgcatccccagttaagcaactctcttcccggcatcctcccaggtgcccctgaaagacgcctgggccagcagctcaaggcccactcagagtcccgaccctgctgcgacttctctgttgccctgccaggtgctttgcctcggtttctcaatctacaaagagtgagtgatgggggtgccatggataaggaggagattctacctgtgcagccctgtgagctcccagcatccgagacctcttggagagggaccctgtgggttggcaggagccaccgcaccagataggaagggaagaggcccgccatgcggcaaagtgagctgatggacacagtaagcacactcacaggttcccgcctctgctatagtggagtttcactgagaggttactgagtatcaacaacagtatgtggctgaactgggaacatctctattatttagtgttctagatacagcaggtaaaaagtcctcatggcaaagaatgcctgcagtcacacaggaacgtcacatgtgtgctaaggcacacacacattcctccagtcacgaactggtctctttttgatttgagaacaaaatgtaggaggcagtgataaatgttagggttacctccaactacaagcaatattcagcatccgttcaaggccttcagactcaaagagcttgattagctgatgaatcggcccagtggtctagaaacacagggacgttatccctaatttagagataggcaaatccaggctatctagttcagactgttttccagtcgggataactccctccaggacttggtttctgttgtttggaagagaacacagcttcctgagccgaggggaatcacattgcttctgggctgtagggcgccctgcctggctctagagattgagagtagttcatagtttgcctgttgccttatttatgtttcaagagttgtgagccccttgggtggcaggacctgatggcaaatagtattgttgtcacctcaggaattgtgatggggtgggaggcactccggcctgccggtgaggagaccagggatctaagtctggccagctgtgtgaccttgtcatttaacctctgaccctcagcctcctcacctgcaaaatgggagggtacaactgtattcgccctagagtattagcctttagatgcctgccgtgctcacctttcaccatggcagttgccctctgaatcatgcgtaattttcagtcagctgacttcttgagcaccctcttgcatgttagttagtttagttttgttttgttttgttttttaatatttggcttgggaacgtttcagagccaccaaggttgttgccatttctgttgggggtaccccagtagactatgtggtgtatgaccccaaggatatacagaatcacatcgggaggggaaaaacttgttggtatatatatacatatatacaaacattagccaggagaaatggttctgtgcctctcacaaaaagctcacaaaacactgtggtctgtggcagcagcagatgatattgatgatgatagaaaagttctgtcttcactcagacatgccattgatcaagagcatttattcagagactactatctgccaggcatcgagccacgcgacacgagccaccagtccgtttcttcatctatgccgcattgtgttgatactggcaaaggactgaaataggaaatacactcatgtcataggaggtgtcaagctgtttgtcagggcagagaagaggagagtaacgtggcacaagttgtagacatcttccttctgaagacatgggtgattggaacagcatgtcatcaggtgagttttcagtgttgcttccagttctaagctgggataattctgagtattcttaaaatgtactgctgttggaggataatggaaaagcgctgaactcagaaaaagccttgggactgtgagcaccatcaactgcattgaggagacatccaaaagtataatgccttcttcaggctgtttttactagaccatatagtcctactaataaatacttgtgcaaaacagaaatacttttaaaaaaataatatatttattcacttaattttcccagaaataatgccttgatcatatgttttccccagaaattgttagacttaccttctatggtcaacaagagctttcctgaatttcttgagatttagtgaaagcaggtagatgtaaactatattaattacattgcattttccagaaataaaaaaaagcttgaatacccctgaaattcctctgagtattatcatcctgtgctttgttgatagagaatagcagtgacctaataatttcttttttaaccactaattctagacctgaggtgtcatgacagagtatgaccctgggcaaatgccactctttcagctcccaatatagtaagcaatcacacagcccagaggtgggagagtaggtcctaaaataagagcaggtatttattaagcactcatcttgagcccaggactgtggcaggtggtataatcatcacaagagacaagagggcttcttaaactcaggaagctccataatggattcctttttgtgtctggagacctccaaacatgaaatcacagacaaggtgatgactgattaaaaataatggcaataataaaggccacttaggcttataagtgacccaggctttctaaatgttggaaagaaaaatgaggggggaatgaaatgaagatccagtgaggccagcgtcctgtgaagtgatcaatacgcagaacgtgagccccatgtgcctgttattattggttgattctctcgtgctgattcatgacacttagtggttaaagactcagatggtggaatcccactacctaggttcaaattcccagagccaccatttattagctgtgtgcctcgatttcctgatctataaaatgggggctaaaattacacctgcctgcttcctggagttgttgtgaggattaaataagtaaatgcttttaaagcaatagaattgtgtgaaacacacaggaagcactcagcaaatactagctactagtactctgtgggtccaactccctatctgtctacctcaggctccaagttggactgatcagagaaggggaccttctatacttgatcttttttttttttgagaccgagtctcgatctgtctcccaggctgcattgtcaagatctcggctcactgcaaccaccccctcccgggttcaaatgattctcgtgcctcatcttccaagtagctgggattataggcatgtgccaccacgcctggctaatttttgtattttttggaaagacaggatttcaccatgttggccaggcaggtcttgaattcctgacctcaggttatctgctctcctcggccttccaaaatgctaggattacagttgtgagccactgtgcctgacgtacacatcattttaaaaataactttattgaagcgtaatttatattcaataaaattcacatattttaagtgtacacttaagtgtaataaccttaaaatcatagaatttcacttacccaaccccttgtcctgtgtgattactatatgtcttctatttacacatactttataagttccactcaacaatgtttttatttttactttagtcaattgtcttttaagtaaattatgggaaaaaataaaacatagtattttatatttacctacttatttactgtttctgatgcttctactacacattctatagatccaagttcccttctggtatcatttccccttatcttgaagcaacccaatggcatttctataatgtaggtctgctgctggagaattagctaagcttttgtttatctgaacatgtcttttgccatcctcttttgacgaatatttttgctggtatagagttcttgattgacaggtttttttttctttcagaactttaaagatgttccattttctcctggtttccactgtctctgatgagaagtcattgatttttttttttctttctgagacggagtctcgctctgtcgcccagactggagtgcagtggcacaatcttggctcactgtaacctccgcctcctgggttcaagcaattctctgcctcagctcccgagtagctgggattacaggcacctgctaccacacctggctaatttttgtatttttaatagagacggggtttcaccatcttggccaggctggccttgaactcctgacctcgtgatccacctgcctaggcctcccagagtgctgggattacaggcgtgagccaccatgcctggcctgatattattgttattatttccctgcacataatgtttcttcctttgctgactgcttttaaaattttctctctcagttttcagcagtttgactatgatgtgcatcattattatattcattatatttgttctgcttggagttttctgagcttctcagatacactcataaatgagaagttttcaagttcgggacttttggggccatcatttcttcaaatatttttttgtactccattctcactcttctcttgctgggactcctgttatacatggtgtttggccatgttatagtatctcattggtccccggggctttgttcagttttcttcagtcttttattctctgtgttccacagatcagttcatttctgttgattattctttcagttgactcatgtttcctctaatgtctccatcttcattaagcctattcataatttttcatttcagttacttttcaattatggaatttccattctgttcctttttatagttcccatttatttgtggaattctctatatttctccctttaagatcatatactcatttatttcctttaatcagtttttcttccatcctttaaatatatgtatctatatatggatacatatgtagcactctctctatatatatatatctctctacacacccacatatatatagctgttttcaaatcgttgtctgccaagtccaacatctgaacaatctcattttttgtttcctattgactgcttttttccttgactatcacattttatatttctttatatgtctagtgatttctttttaccgaatattagaatcatggataatatgttgttgtgactctggatcttttcatattcctaagagtattggttcatcagcagacagtttaccatgaacgtgtgtaggcttggttttatgcttgttggtgctgagacattgaaagcccaaacccctcaacctccacatttaattttcccctcctgatgttgtcagggcaatgattttggctttgccaggatggatctagagtgggtctcactgtagacaaagggccttactcccaggaggtgcccttgcagtgtcagagtcatctgtccagggtggtaatgagatgttaactaggtctctccacaatttcagggccgtaagtccaacctcctgacactgctttttccccagcactgattaacctgtaccatctcttttctgctgtcaaccctaaaccagctgctatctgatatgcctcattggtttcaccttgtacctgtacaacccagccctaagccacagacacacaggcaacccctacacaaacttctagggccctgtatctacctcgctgtctcttctggatgtcccaccacagccacttcagcttcccacattccaacctgatttctgccttctcaattccatggggctgcagtgttgtgcttgaactgtagctctttgtgctgtcctcgggaaactgttcttaattatagtatattagataatataatgttatatgttatattttactttatatgtcacacatttactgaggacttattgtgtataaggcacagtagtaattggaagaaggaaaggtactagaatcttgctttatttggaaaataacaacttagaaaattttagagccagattgcattttctcatccaatgtccaccttttaaagatgttgaaacctggacccaaaaggtgacatgacttgtcaaggtcacacagttattgatagcagaagaggaaatagcctggcattttcccccactaaatccctccaaaaatatattttaaaagaaaatctaagcatgatgtttagaaatttttaccactatagaaaatttggttagtgccaaagtccctattgatgcaatagtgatttgagccagaattagaaaataagtaagtatgtgaccctaagagcattttgttcgagttacatagaaagattagcttatggcgtagagttaccgtaagttggcagcaatgaacaaatttggttctttgttacactccatctcaagaacatccagggaagagaaagctgttgcctgggtataatggtatttgccagaaaaaaaatcattagagaggtataattaagactagtttagtaactcattcaactagataactctataatgagtacatctcatttaccaccaaaaccatagagatattttgaagttttccccaaaagtataccttttttacatttctaaaggaaggagtgaggatttgcagtgagtgcaaccaagccaccttttcctcctgtttggccttattatcaagtatgttgctcagcaaacagccagtcctcagaaacttcactccaagaggctctgtcaagggtttggcacaaagagaatgtcgcaaagattttccagtgctctagaatatatccttgtattcaaaacccagttgtctggttctgggagtgagtgtggcaggaaaagctacaggtggatcccgtaggtagtttctcccataagaagtacaggccaggccaggcgcagtagctcacgcctataatcccagcactttgggaggccgaggcaggcagatcacttgaggccaggagtttgagaccagcctggccaacatggcgaaaccccgtctctactaaaaatacaaaaacttagccagacatggtggcacacgccggtaatcccagttgctcgggaggctgaggcaagagaatcacttgaacctgggaggcgcaggttgcagtgagctgagatcacgccattgcgctccagcctgggcaacaacagcgaaactccatctcaaaaaaaaaaaaaaaagaaagaaagaaaaagaaaaaaagaaatgcaggccactttttctttcagaattggcagttgagatgattcagatcaactgtcctgccgaggacaattagaaatgctggacaaaatattctaaatcttctttctggagcttggaaaagatgcctgatagaaacaaatgtgaatcctctgtggagaaagataacatcatcaacattttcaaattactttgaaaaccaattgtgtgaaaataaggttttggctgggcgcggtggctcacgcttgtaatcccagcactttggtgggccgaggcaggcggatcacgaggtcaggagatcgagaccatcctggctaacacagtgaaaccccgtctctactaaaaatacaaaaaattagccgggcgcagtagtgggcgcctgtagtcccagctactcgggaggctgaggcaggagaatggcgtgaacccggtaggtggagcttgcagtgagccgagatcacgccactgcactccagcctgggcaacagagtgagactccatctcaaaaaaaaaaagaaaagaaaagaaaagaaggtttcattcatgataccaaataactatatacacaaggagacaaagtaacctgagtgaaaacggggagaaactatagaccatagaaatagacccacagggaattgagatattggaattgtcagatatagacttgaaaataactgtatttaccacattcagagatatcaaagacaggactggtaattttccaaagaaccagatatggaaaagaaccaaatgtaaattttagaaatgaagaatacaatcactgaaatgaaaaaggcagtgaatggatttaaaagaagacttggcacagctgaaaacagttattgaactagagagagggcagggaaaaatactgataatcaaacacagaaactgaaaagaattgggaatgcagagaagagtacagaatatcagggaataagtggatgctcacatttatgaaatgtttttttcctacatctgacagaatcgttatttttaagttaatgtgaattacatattaacttgttatggaagtataatatagtggttatcttggtgtaggaggggtgagtggggctgctgtatagctggtggggttttatttcttggtctgagtaatagttgcatggctgtttgttttgtgataaatcatacattgtaacatccccctttcttgcatcttttgtatgtatatttcacagttttttccaaaaaaagatgtaagaagaagcaaaagtacaggtccaggtagctatatcattggcagatgccgaaggagatctgctccttactctgcctggagcacaaaactacagtttgccaccaatagggaggcagcacagagggacggccatcgtgatgcaatcacttccaatggattagagctgtcatgagagatgcactgttgagaaggattgtgaggccccatctggaccagagggaaggagcagcatctgccatgacgcgggccaacaagtggcacatgtgtgcagtgtagttgtcattttgcctggataatggctaaggaatggaagtggtagcttcaagttggcttggcttctaactccaactctgccatttaccaagtgtgtaatctgggacaatttatctgtcttacctaagcctcatttcttttatctgtattaagacggctggggaattaaatgaaacaatgtatgtaaagcacttatgtggtacccagcaggtgccgagtcctcgggaaatggtagttaatactattattgttgttgtttgctttagatcatcttgtctgcctttcaccatatgcagttttcttctaacacagggtttcttttatatctttttctctgaatttctcttttcaatccacattggtaatataaaaaattaattcaacttgaaggctgatattttaattactcctaaagttttaatttattggggaaccagttacccaccatccctttgctaagacaagaaccctcctttagtgttcctcataccatgtgtgggatgcagaatttattaatctggaaaggctaaattaaaaataaatgaaaatctctaatgaataaggacactctaatgagaacatgcaaaaatcataaaacttgaggctgtaggaaagctatccaggcaatagttctttccccgtttataggaagcttcttttcccagtaagaaaatgcattagtcacttttgaagctcagcttgataaacttactcctttccccaagagagaactatctgccttcctagttctagacctattttcttttgaaagccattaagcctgtgagaccattaaaagtgtctgttacttcatcagccaaatgaaggcagaaaacatgatctgtgagattcatcacgtctccagcttctagccagtgcaacatgattcatggagatcagaagtaagcgtgggctagtagtcacaacctgatgatgacagtggtgattgtcaccaccacaaatgctgaaaggagcactcatttttagaagcagtcaggtatgactttggaagatgaggacccagagttggctagtgagttatagtaagaggatatttatctgatcactatccctgggagggaacttgttggctcacaaaacttagaagccctccaggtggaatacctcctcctggcttaatggaaaggtgatggtggcacatagaaagccactctgtcttatctgcgagtcatcctacagttgcgctaccacatctgctctccacccttccccactctgctctctggctggggagtcgaccagatggcctccatcaacaggctgcctcatctccagtctgtagttgggttcagtcgatggggagccgagcaagagatcagcaggtgggagtagggtgaggtcaggttcttctgtccccagatccttccctgcaggtctgggctggcattgtcacagcctctccgagtggtcctttatacagaatgctgtccttcccactttctgtaaccactctttccacttgcttcttcagcctagtggtgctaatagatcactgttgttgccacttccaggccacccttgtggttctctttaccccatcataaaaagcaccagtcatctcaaattatcttaatttgagtgtgaggagatggtgggacaacctcgtagaaatatctagtaggcttatgaagcatgtcttgaactcagaagagaggacaaagaaaataaatgtaagtacaggtgtggatgcatgtacttagtggtgactattggactcttaggaaggagtgaagtgcatgaattttctgagagagagtttagagagagccacacaaagggcagaagactaacagaataaaagggcagagagaagctccacccatggacacagctcacaggtctagtcttctgggaactgttttcatattttcctaggtgaagatagtctctccctctcctctatgcttccaccgtcctttgggcataattcttaggaatattatcactgaggataacccccatgcaggcaaaactccagtcactgcttgagagcatctgataacaccaaaaagactggatgaggttgctgcagcctcccaggatggccagcgtgccctagggcctggctgctggttggtggggcagcagctgcagtgtcacttgagacccggttagaaatgcaaactcattccccacccatgatggagaattacaatccacattttgacaagatcctaggggacctatgtgctcatttaccctaaagggtcccactgagacctgtgtcacgcttctaagaccacacttcaaataacaatggctgtcactgatatggcctttactatgggcctgatgttgttctgggcactttgcttaaattaacttgtttaatcctcacagcaactttatgggataggtaaacgatcatcctctctttaagatgaggtcaatagttggtacaaggacacatggatgagatgtggtgggattgggattcattggagtcatttggctccaagggtccctcttcttcaaccactgcactctcctccttctcccacctcccatggcaatcagcagggtgcttcataggttctccgtaggtgcttggaagatgcacaagtgaatgatggcatagctgtctgtggtagcctcaagaaagggaaccttgatcatctggggaaaactttctacagcctgggtacgcctgtctctctcattacagaagggagagactctccgatagtattttctcagatagaggatgtagctgaggatggaaaacttcattctagattcccctgtgggagaagctggtgtttgatctacattttcttagaatctgcatcgcaaatccaaggatagtgaggttcaagggcagttatggggctcggtgggcacagtaaggacagtgcccttcacttgaacacctgttttttttaagtttttaaaaattgttttaaattttctttttgttttttagagacagggtcttgttctgtcacccaggctggagtgcagtagtatgatcatagttcactgtaaacttgaactcctgggctcaagtgatctgcccacttctgcctcctgaagtgctgggattacaagcctaaagccactgtgcctggccttgaacacctgtcttaagagaaatctatttctttcagatgacatccaattctaagaggaaggacttgtagcgaagcttagaatttgcccaccatctagtgactctttttgtttggatttggctaaagtttatttggaaatacagaaggcataacttgctttggtagggccagcctctcagtcagccatcattcagctaatcagacatctggattaagcagtatggctttctcttccattctgcaaggacagccagttcaagttaaggagcagctttctaaaactccatgtcctgactcctgccccagtcttgaaagtgggctgtcgccttaatgctggcttgaagcacagcagaatccagagtcagccccactcctgggaagccctgactacatcgggattggggatatcacatgtagaaggggttttcccaggcttgaggttgactcgccatttcttttcatccaggctttccgtattggcagaatctcacatggtgccgcagccctctcttctgttggattgggtcgctgagaagttgtggttaagattgccccagtaaagccagcagagtagaggacccctggcctaatgctgtccttcccctgcccctctgtggcaccagatggggattatttcctccactttaccagcgaggacgttatcaggagggccttcctcgtgtgcttcctgaatttgttttcctgaaagtaaaagtgatatctgcttcctctgatttcacacacaagcaacaaactggttcctcaaacctctttccagggatttctttgagagacagaacaaagccaggaggagcatggggctgacagacggagagccctgggtgtcctatagctatccaggctacgtcgcagtctggaccccacagccctggcgccgggaccctctacctgcacatacctgaccaggtcctctccccattcagccttcagcttaagcaccacttcctggaaagcctttctgcagcctccatgccaaaggaggaccctcgtggtaccctattctgcttctttaaggctcttcacagagtttattatacatcagttgcatgattatttgactaatgtttggctgcctacaagctctgtgagggcaaggcctgcagggcttgtagtcaccaccgtattcccatctctagcacgcaagcatggctcatggcctgtagagcttagctcagtaaatagtctttgagtgaaatgaaggtattgggttaggtgatcccaaagtcctcttcctgtcatggcaaactctgagtccacctatgagaaacttgtacccaccaaccccctaaacccaaacttctcttttcctagttcagtgattctcagcactgtcttctgatgaattctgtcatcaagcctccttgatcgttttcatactttcctaaggcttggctggaatctttgagtttgaataattgggaatgtgaaatgttcatgcctaaacaccaacagaaaagcagagcgtcaatgtggaatccaaacaatggaatctaacgttggcaatgatctccaattctagggtcttcaacagtttctccctgtgccctcccatctcatgtgaaatgactcaaaatatgaattcaaaagagggaagtatgggttgaagattacatgaaaagaatagagtccttaagaggagccttgaatcaggcacattaccttccagccccaggaagttctcattttcctctgctcataaaggcattttcatactcttttgtgatagtatctctggggccctgagcagaacacttcatcccaaaagtagggcttggtgagatgctgttttataaagcaaaagaggatgtgatctgttgtcagccctcgtcagtcatggtggacaatatggaccaggtaatggaagcaccaactttggccaatctgggcatctccaggctaacctcaaaaccaccgtagagaaaggtgccagacattgctttctgcaatggacggcttctcttgactttttaaggagaaacagtgtgatttatagatgcaggtcctctaagcctttcctaaccggaattgtcaagttgcaccccagagggaatgcgggcagcactgtaagaggaagaaaggaaatccatgtctgccggctaaactccatcctccccttttcccgagcccagcactgaatgatgccactgcccaaggccccatctccctggaaggtcttcctggtaccttgagagtctttccacccgccaagaggcagtcacttgacatgaactccaaactagcgagactgaatttctaggttatgtgctgtttgatctttgcatggaaccgtatgttccaaattttccagtagagctctcctgtcacatactcagtcctattggtcccataagtacacatgtgtttgtcagatcttaccctgatgtagggctagaaaaacaggctcatcacatgcgtgggccaatagtgatcttgtgttcacagaacgtttgtcagcagttgcttcaccaggcttgtctagggcccattttctttcaccaacatgagcagccagccctgaagaaggcccgacactcgcttatcagcggtgagcatggcctatctgagaacacttgggtggagaaatgtcgtgtattttccaaattagaacttgagttggaggagctgtttctggggcagctgtgagccaatcccaagaagctgttaaacatccaggccctgagagccaaactctacatggcagggtagagaggaggatgtctggccgcacgccttcacaagccagcctggctctgccaccccaggcaggccgcgaggaaagcagatggaagcgagagcctttcctggaccagccttggaaacatctgggctctcctggaagcagggactccactagactcccccgccttcccagcagatgctgcaagcacgtgtcactgctttatagactcaggtcgtggaggctgagagctgctgtctaagcgtgtggggggcatttgcacagtcgtgaagccatgggctaggagccagaccacctggcactgagccctgtgccaccacttcccagctgtgcgaccctgggtagatcactccactgctctggacccactcttctcatcagaaacatatggttacaaatagtgcctacttcctaggttgttgccgggaggagatggaatgatccaatagagtgctgagggctgctgtcgcccatggcaagtcttcagaacgcgctcatcaagttggagggcctttggtgttccagggcagtccttcacccagtgacagaatccccagtcaggcacttcctcaagtcactgcttggatacctctgaggatggggaatcactacctcttaaagcaccctattccaccttcagataagcctgtttctcggacagataagtgtttatctgtgctgaacctaagtctttcccggacacttcgcagttggtcgtagttccatcctgtggtcagacagaactcatctaacccctcttcctcaaatagcagttgagatcctctgaaaatcactgacgttaccctcctgcctgtgccttttcaccattcctgacaaaacaccttcaatttcttctaatgattattgaatgatgttatttccaattctttcattcttgtggtttctgtcttctgaaggcaccccgtgctcacgcacgtgacttggctccatgtgcatggagtccctccccacgtgcctgagacacaaagataagaagatgtgatgagactcaaggagctctcagcgaggcagggaatggctttccaggcaggggagccgcgtgcgctgggattggaggcacgaagccagagaactgcggggtgtattgctcaagcctagggtaaaaactgggagtcatttgagaccaaactggggaaggaggcaggttagtttacctgcaggtgacagggagtcactgggtgactttcagctacaaagtgacatgttccagtgtgtactttaggaagagcattttaagtgtagcttgaagactgggcaacactggaacccgggagaccagttgacaaaatgacgagcaccaaggggacagagaggaggaaaacgagtcatggatggaaaagctaacagtggctcttctcctgggggcaggacaatgagtcattgcttttttcttcttccctgtgttctgcaatttctctataataagtattttctgttttctctataattagcatgtattatttatacagtaagaaaaatgtattcatgtctaaagatacttttaaaccaaaccagcaggacttggttactgagtggaagaaggagcctaggagatcagttttctggtctgggtgctcaggtgagtggcgtgacccccagcctggacggggatgtgaggaacagggcatttggcaggaattcttatggcatctctgacagctgaaatgacgcccacaagctgctttcactccacttggcctctctccagcctgttcagtggcctctgtcccctgcaggccctgaaactcacctgtcccttagacacctatctggaaagcaggtgtctgtgcagcaatactcaccagcgctccaggacagcagtagcatttatttagatgataagttttgtcactccttcagtaaatatttactgagtgcccacatatgctcagcaccaagccaggccttagcaacaaaatggaaaagaacaggcacagtccctctcacaaaactcagcctaatgtgagagacagatataaatgttttaaaatcccgttaaggaacataacatttcaaactgaggtgcactctccagaggatagaaaatagttccaagaagacataaaggaaacgtttctggtctgggagttgcgtgatgatccctggggaaacagatgcttgggctgagagtgaaggataagtgggagggaagtggggaaaagcattccaggttgagggaacagcatatgtggtggccctgtggtgggaggaacagtagcatattcaactctctaaaagaagagctgttttactggagtgggttggggagaggcagtgggtggagaggtgggtgtagccagacccgacagggccctgtagggcacaggaaggatcttgtcttcatcctaagagcagaggaaggcattcaaagttccagcaggcctgaggcagcctgctgagcagccctccagctgtggcctggaggggagcctcccgatgggtgtccctttatgtcccacacccaccgttctcttgccattggaggcggtggcactgaggcccgtcgagacaccccttcatgcctgggtagcccagatttggggttcccaccacctcgagtagcacttggaagacgtcccccaccccccacccccagcagatgccctgaaagccgctttgcagttcagttttcaactttcttcgcggctctgcatactccaacactaatgtgtatacaacttgctaattaatggaatcatttcaatctgaaaacatcttgttctaatgggaggctgcaagcactcttattaattcacaggtaaaatcattccagcttttctcttctttctttttttttttttatcttcccagcttggcttaatagctgggaagaatcattctaatcagccttgcgagaatcacatcaccagaatgaaaagcaccaacaacggccttggggtttgggaaaggggtgaccagccttagtttacccaggggcaagcgcggtggatgaatgtgagggtgagatgccccacacagaaggtaaagacacaaaaagtgacctgtgtagtgcgacttggaggggggtttcctgtcctgtgtgtcagaggtggcactcagggtgactttctgcaccactggctctgctggagggaaggaggagctgcctccacattctcacctggcatgtgagactcactgcactcacctgggcaggaatctcacacgtgactttctcggggctgggtgtcatctgggggtgacttgctgataaccaccttcctgtcatttgcaaatgatttgcagtgtccctttaaatgaatgccatccccagtgtgttatttctggtataaccgagcttagtaaggggggccttctccccatagaccgcggtgcaagccccagacctcaccgacaacacccatgtccccaggcgggcttttcctttactcttttttaccagagggatctgggtgctttttagagtttcttttcttgtggtaataagaacataacaaaattgatcatttcaatgattttcaagtgtacattcagtggcactaagtatcttcacactgttgtacaactgtcatcaccatccagctctgggactttttccaatcccaccatgggaaaaacctcgaggataaatgagtccctgcagggccgtcttgagtccacatgagctctcactgtcctgagatgctgctctaggagaaaaagatgctcagttgtctgtaagatggggtattacacaatttgacagttatggatggaaacaacatgttcttccccttggaagtacagcagctgccagtcctttgctttggatgagtctccaagacagatttggagtgaggccaacctggatttagacccctgcaccatcagtccttggcgtgtggctctgagcctcagtcttctcatctaaacaacagggctggcagttccttccttgcagagttgctggaagattgcatgagatggcgtcagcacggtaccgcggtgatgcttggttcagtgagtggctctgtccccgcaggtctccaggtggtcctgaattccatcatcaaggccatggtccccctgctgcacatcgccctgcttgtgctgtttgtcatcatcatctacgccatcatcggcttggagctcttcatggggaagatgcacaagacctgctacaaccaggagggcatagcaggtaagaggggcaggcggctgcgctcccaaggccctgccctctatcgctcccagcacctttcccgctgctggctacaccaacatgaccagcagagcccagggaaggccccattcattcagacacacactgggcatggttaagtgagaggcagagacccgtatcctttttttctcagttccaatttttgttttaatctctgttaaaccggcctaacgcaaacttcgttcagcacttttcaataagctacacaatttgagaaacatttgaataacttagaacctatcttttgtcaatctacgacttttcaagccaaccctgagtattttaagaatcagagctgacctggggtcgtcagtctctgctccttccatgcttcagtgtggttggccattgggagccctttcacggggccgcttagccctgagcaacaggttctcccagcaccactctaagatttttctaccttcatggtgctgattccagatcctctgtaattattgtttctgcttctccattcacaggcagatgccccagagcccctattccaggtgggggaggagggcaggtgggaatcacccccttgccggcagccaaacttcctcccttcaaggagaaggcttagttctaccccatgactcccagtcccttcctttttgagccttcccacttcacgttccttccataaatcaatatatttaacagcaatgctggctcattaggcgcttccctgcgtggcactggagttttggcttgcaggatatgctgcaagctgctgctaaagctactaacatcgcagcttggccttttaaagaaacatttaaacagaaattgacaaggcttttaaacagacatatacagtggcttaacacaaagaacttgttgaaaaaataacacccaccccaaaggggctagctgtgttaaatatatatgatttttttcacacagcaagatccatcatcttagtttttagcatcttggtggaaaaaggggagcatcatctgccggaaacagtgaaggatacctaattttctccatcgacactgcacctcattcccactcagtcccagcactcagttaaatgggacctctcgcttcattggggtgaggagggatagcttccaaacaacagggagtgaaattcgtagcagaaaccaaaacagaatactttctatgtatgatctagtatgaccggatggattaactgcatatttgagggcatttctagtttatttctacatagccacagtcctaaaaacaaaacaaaacaaaaaaccacacacacaaaacgtatactcctatagacacagaatcacacaaatgttttcactttttggatggaagtctgtttaacaggagactgttttttcactctagagagaatttccaaattacttgggtcataattgtataaaataaactatcctgttttcaaaaatggaatccttgttaagttggaagaagcaggtcttgcctgtagctaaaattctgagactttttagccttgcttaaagaaatgcgaaaccatatatgaataatattttcccctttaattaaaatccttccttttattcaggttgatttatagctagctcagaaccaataaatttatatgaattgtgtggccctgtgagagctcattttaagactccttaaaaactgactgtggtatgtctgaagttcatgcagttgtattgaaattatcaatgacccatttgacccaaactcctcaggaagtctcagacatgtggagtctcaaagattccccatcagttcagcagtgaatgatggtgaggccctcactaacaaaatgggggagagcgaaatggtagaattcagccatcgagccaaagatggcggccctgctgtgcaatcagaggtctgtgcaccacagagtaaggagaggggctccaaagctgcaggcaatttccatcatcctaacgagaaagcagtccaagagtgttttctgccggtggtgggctcctgcaagggcgggtgaggataagcggccctgaatactggttggaagcccaaggctttgttaccaggcctcagaggccctggatagtcagaaaatggtgagcatggtagacaaagaaagcatggcacggggagggagccgtcctgaaggccatagccgtagggcccagtgaagaggtcgccccaacgccccaagtaccgaacctgtcatggcctcctcttctcttaggacaaagataagacttggcctccccaattggaatggccaatttaggatcacattgtccacccttgatagtaaacaggaccaggaaaagtgcctgagaagttgcctcctaccaagagactcatcagattgtttatgtgatgggtttatctttgcctgcaagttcagaagagaagtaggctcccatcacagaaatggccatgagccaagggggccaggacaacagcagaagtgctccagagagaagggccctgccaggctccatgagaaggtggcctcactcattcgctggagtcagagtccctgctgggaagaggggcccaggacacagctgcagaagcctgtcctctcaaatactctgcaatcaggagcttgctgtcccttcgttcccaaacctgccgtctgatcacaagccaggacccactctgtcactcttagcacaacacgatgccgctgctatcaagcccttgtccacccacagagtgggcagtgcagacaaggagggaaaatacgcgagaacccagacatgtctgtgcagccgtggagtagaagaccaaatacttgcaggctttgaaaccaacccctgagtgttttggagagttttatataaactttggaatgggtggtttaatttttttctttctttctttctttctttttttaaaatttcagactttggattgaattaccctattttccgcaaatttagattacacaaaagtgctttgtgagcctttgttgtaatttttgatgagatttacatcaaattctttttatagtccaatattatttcacagactgtgaattttatgtatctctagatttcaaaatacgtttgattttgagccatgtttccaataaaatccataaagaaagttatggaattgtccaggtgagccatgttctacctctagactgcccttccagggagcagccccggtgaaggcggtctcagaagaggcggcgtttccctaatcccggaggcatctgcaaggcgccttctcagctcctcaacagacacatcaccatatgccgataccttttgtttccggttgtcccatctgtttgatggtgcactgagccaggtcactctgaatagcttcccaatcacagtaattacccctgagactggcacagagctggttggctaaaacctagaaatgaaatcatcttcattctatttactccttaaagttgagttttaaaaaagtaattgatttttgtcttcagtgatttctccttggaatcactaactggagctctcccaggattgcatgtttgtgttggtattaactgcgtttctaactctctcctaatcgtcacctccattattttaccgaaaacttaatttggactttccagaatgactctacctctcttcatttctgtcttaaaatgtagaacctgcattgctttgtttctgtctcccacttcatgttcccactttcctccccaggacttcatgactctgcaaaagaaaactaacacatttttacatttaagcaaatttctcctcaccctagagtgtgtgttgctaggacctgctgatttgtgtgtgttcacattttttcaagtgttcgctttagcgctttttatagatacctatttttaccagatcatcactgcttcttaattgttctcaaatctttttcattattgttcaaatcggattttaaatagcagagtggcactaaacctttagataatgtttctgaatctcatccctttctctcttattagtgagatcacttccccttgatgccattttctttttcgcagatattcgtaaaatccccagagatgttttcctttctcgaggacactcagaattccctttggcagccttctcctcttccctgtttgtgatgtttcaggaactgagagtgcagggaatgctgtcagatgagtggtcccaatgtaaagattaacttcatctttattctgcgaaaaagcaaaacatgagaaaaagatgcaagaaaaagatgcaagcttccccttcactttttcaccctttctctttgtcccgtctctgctgtcattccagtacttttatcacagtgactgaacacatctccctagaaagctatgactagaatgggtgacaacccaacataattaatgatctaattggctcttggttttccagtctctcagctcccaaatttttcggtgcttattatccactttttcatgtattatttaggcttaggatttacattttagcctcccccttttttgtagcatcacatccaaatctctaaagatttcacatttttaaaagtcataaaaagttgtagttagaggactgcttgtttcagctgcgttaatggagccctcctgggagctggaccctgaaataaggaaatggtgtggatactgtctctctagcagttcagggaccagcagtgcagacctttgcaccttgatcaacgaacacaggactcacacacaactttaagcactggcccaagaataagccaggaagcagcattattcataatagcccaaacctggaaataatccagacgtccatcagctggtgaatggataaacatacaatgaaatacactgctcagcaataaagaggaacagagcctactgatatatgcagcagcacggatgaaactcaaaacattatgctaagtgaaagaagatggacataaaaagcctcatagtgtgtgattccatttatatgaaatttctagaggaggcaaagcaatggagacacaaagcagatcaggttgccagggactggggatgggaggaaggattgactgcaagcaggcgaggggggtttcagggagtgatggccgtgctttaaaatggattgtggttatggctgcatgactatataaacttactaaaaataattaagatgtacatttacattgataaattctgaggcatgtaaattataagtcaataaagctgatggggtcagtgggagagaaagagaggagaggagaagaaggaggaggaggaaaaggaggaggaggaggaaatgacagaggaggaagaggaaatgaaattgacagagaacaaggaggaggaggaggccacaaagatgaccacgaaggtgatgatgacaatgaagaggaggaggcatgtaaattataagtcaataaagctgatggggtcagtgggagagaaagagaggagaggagaagaaggaggaggaggaggaggaagaggaggaggaggaggagctgccactgctgctgggaagacacaatcgggcatatattttcaagtagactctattctcctaagaattatctcttacttaaggattaatatttctcttctggtcttcctcttgggagtgaacagtttcagatttaaagccaccgactgagaatcagcccaccggccagtcctgttcaatgcacagcctaacgtaggcaaagtaatcacacttacgattgttttgatatatatgaaaccagaaaataatcctgggttatctgttgtctctaaatgaagaactataagcaaattctctctctctctctctctctctctctctctctctttggaagtgtattttcattgttataggcaatcatttatttgttggaactggggtctcttctgtctgttattgtcattactttgtctaaggacaggacaatgtccttgatttcacaaacttttgtgaattccacaccgttaccttccatagccagagccaagactttctcagtgttttcccataatggaaattcttagatcagtcaggtcttgtttaaatttaccatcaatctccacactcaaaatataagtcacatcttcattcattaatttgctgggagctattcccagcacgtgaaattagtccaactgctgcatttagccacagacactgtgttctactgtttcctgacaaagccccgtccgtactgaggaagcacactccctattattcactgccgctctatcttgatagaggtcagaaaatgattcttctcttctgaaaagtattcatgctgcagagcaaagggcagagctgtgaagtcccacatgacatgcatgaaatacagtcagtagcgtgtactcacaggctgtaaggaaaacggctgcaggtgatccctctccccggcagtcagagtccgttttccgtctttcgcctatgtaaggcttcactgtaaagtgacttgcgtccctggcaatgtatcctctaatacatagtggacccatatagttagaaagctttattggatgggatcggttggctaactatgtgaaggagtctttgcattggtattgtccttaccctaaattctggtattccaatacaagtgtctatagaactctaccaccagaaaaagaaaatatggacttctaatcgctttctgggtcagtttccacttgcagtggtggcatcatcattattttttgattggccatttgattttgaggctgacatgttgcagcagaatgggcaatagaaatcaattactaagattaaaatacagcttttacaacagtgagtggaaaggactgaccttctaaattaacagcagcctaaatggaaagcctactttcttgtgttgcttaattcacatctggggacctgatttaaacatgtcttgcgctgttgttgccatggttgctttgcccatcccatcaacctcatcctgtcacttttctctctgacttctttctctgcccacatctctccctccctgctgctcccgtctcctgtcttcttctggccatttgagatgttccagcagaagatgacccttccccttgtgcgctggaaacgggccacgggcggcagtgccagaacggcacggtgtgcaagcccggctgggatggtcccaagcacggcatcaccaactttgacaactttgccttcgccatgctcacggtgttccagtgcatcaccatggagggctggacggacgtgctgtactgggtacgtagcatgagtgggcagtcagagggtgggggaacagcggccgtgaacccttccctgacacctccctttctcctcctccccatggtcttggggtcacatacgcatcttgatggaatggttgatgaagagcgtctttgatttcttccaggtcttgcctgagaaacaaggcatgagcttttcaccctaacgagtcccctcccccacccgccagccttaggggaaggtcatttttccagtgcgtcccacagtgcaaaaccctggtgtgcaggcatggatgagctggccaggctggcacaagggttccgttcaactcctcctcccatgcagagttccttctgccctcatccttttcttgcctctttcctcaaaagggagctagaaggcagaattatgtattcttagggcagaagagaagaagtcctgatcttctaaaaagaagttatataaagaaaccatttttattgaattgtgtagcattgtgacatgctattcaatttttactttttattttactcttaccttaacatattagaatagtccatcagacaaatgcattggcagcatttttactattccccaaacatgctgctggtcatgtgatgcctatttagaaatacactttttttttttaatttttattttactttaggttctgggatacatgtgtagaacgtgcaggtttgctgcataggtatacatgagacatggtggtttgttgcacccatccacccgtcatctattaagccccacatacattaggtagagaaataccacttctcgagagccacccaatcaatagcaaatcttcgtttaccttaaagttgccccttttattacccagtagccaacactactttgctgcgctttgagcctctgaagtgccagatttttgtacagcctaccccacaggcaaatccacactccatatttgagctgtctcgattctggcaaagtccattattaggaaaaactccagaaaatttattcttcatagtgtctccaacttcagcctgagaaatgacttgccagaatccagtgttgttctccagaatttgggcgaataaagcatgctgccagtcttaaaaataccatctccttcagagttttgcaaataggcaaatttatttggccatcgtgaaaacaatctaagagcctgctcagggaacatgtctacaaaccaaagcagggaagagtgagaggggagcaaatgcttcccgttgagcagagctgccagatcaaaaggaaatcatgccaagagaggcgttgacttcttcctgaatcggaaggaagagttttgtaactgtacggagatttggtgcacagtattctgtcatatgatttctttaaaagcaccatgtcctgttgattcagaatccctctttctcagtttttacatgatagtcaatatgccaaaccccagtgttgctatgacatgtgtccctccctctgtaagtgacaacttgaaacttgcccgaggaccttgtacccagcaaacatttcctgagtgtccttgcctgccaggggtgctcctaggctctgaggattcagtcataaataagatccagtccagtccaattatctcagtctaggaagccaactaaactctaaactgagtaatggcagtatggctggacccatgccgcggcaaagctgctgtgttgtgatactttcaaaaagaagacaaaggtcagaacccctctgcctcaaactaaaatgaaacactggaaaacatttctgagattcatgctcaataagaccttggttttgaataatttgtaagacagaaggaattgaacttattacacttagggaaacttattttgtttagcaaagcagacaaaattcccaagtggacctagctggtccttcttcctggggtgggtccctctgaccagccaaggacagaaacatccttctgccaacaggcagtttctgcctacaggccacataggataaatgattgtgtgggactgtgctttggggcctcatcccataagcttcaggcccatgcattccatggcatcaaactgagggcaggtggcagtggagggtgggtggagggtaggaatagatatgactgcctttgctgatgtatttttgtgttcttccttcaccactcccttcttctcccaccaccacaagtcattgatgccccaccagccagatgtgatccaaagaaatactgtcataatgacagccggggcggggagcagaagcagcaacaactgcaaccaccaattttcagcagctgtgttgtgccttctcccctggggagcgtgtgatagtgctcaggctgggaatggaaacagtgtcagaggtgaagaaacaatcccaggctcatgggacatgcctctctctgattttcccagcaccttcccaaaatggccatgttgtgtgtgtgtgcatttgtatgtgtgtgcacgcctgcaagtgtgtatacacacacgtgcacatacacacacctaaaactgaaacttgggtattcatgatagaagccctgcctagcccagtgctcctgctttcaatttctctaattgctttgacctttctacggctgtttcttccttcttcctccctctccctcttcctttctctccagtgtccctcctccttagcttctaggccagtatctctaaagcacagactctcaaatctcaaaatgttctagcatcaaacatagagctttgtaaatataaaaatacccaaacctccctcagagccattgaattagaagctctaaagtcggggccccagtatctgcattttgaaaaagctctccaggtgattctgatttccaggctggagtttgaaaacgctggaaatctaacctgttgaacctcatggtgctggtatgatgctgctggctttgaacccttctaaggagatagtttccacagggaggagggggaaataaggcctttcactcagaagaatgaattgtccttcaggcacaagggcaagtctaaaggacttgagaaggagcagccaagattttcaaatatagtaatgcatggaaaccccagagctccattcattctaaatcaccaaacagctggaaaagagtaagtcactaaagcatcaaagaagcgattggtcagccgctggttatggcctgagatagaagggatcagggaaggcacctagcagatggcagcacttgcttccagttgtggatgatacagtatctttctcttttcctctaacatccgttattgcattccattgttagattttaaagagtggactaaaaataaaatcagacttggtcgagtaatacttgaacattgcttcagctatgaaagccattggccatgcattgcattgaggctccaacaagccgagcaatttgctgaaaacatttcttctacctaatatcctgtttgaggagtgtgcagatgacagaataaggaagggtggataccggggatttggaaatgaaacaaaactcgggtttggtgtatagtttccttaggaaattacttcttaagccaaaggctcatcctttactctcagaatgtccaagactcttaaaaacagatgggtaggtgtggggagtgtgatcagataaaaagcgctggccttcttcagaggcagtgaagcaccaaggagggaagaacctaatgtgtaacgttaccattgttttccattcttagtttcacgttttgtttttttcaaaaatctaaacatccctagccttttgcacatcattcaaggctgcttgtctcccatggtctacgcatgagccatctcaaagatgtaaagtctgctgggtcagcctcctttgcaggaccttgtcgataggattcataggcatgctctgagaattccagttggtttgaaactctgagcatgacctcttacacactgtgggcagtcacaatcaggtaacagaaatatccatcaattaaacatcttttcagtgctgactttgtgttcagcacttgagatgaggcccctgctcatgggaaacagaatgacatggccactgataggggttggggacacacgcagaacgttgcaggtgagaattgtggaaggggggcagcagctagactaggcatcacactagaggatgtgtttctagctctttaggaatctcaatgcctggataattcatcaggagcattctgttgacttctgtccaccccatgcccttctgggatccccaagaatgttgcacactgtgaaccacagtaaagagcctctggcccgcgttatcctgggttcatgccccttcccatcctattgggaccaccctcttcctgacaccacccattgcccctgcattagtttctccgtgatcagttcttcgactgatttttttttacaagttaaaaattaaacttaaaaattaggttataaaaaatacttaatgagaaatcatctaaaagaaagatttttttagagtcacaaatagtgtgttctctagaacctggaatttgttttggttcagccaacaggagactcttggaacaaaaatctaatgagttaacttttcataagtcacttgtcagctccacccttcatcttgccatcccactatgtgtctggatgtgcggagaaggtatttctattaaattcacacacacacacacacacacacacacacacacaacagctattaatctcttggtattggtgctgctgaaatatccctcgtttatgacaaagaccttttgcatccaagcaggttgaattgggtgttttaccctatttttgtctactccatcttcacaaagccacctcctttcactgcagaatatagagttgctgaaggcttcataaaagttagagctgaattctgctgatgacctaggagtcattctaagtgaggagctgagaaaccctcaagtaacccagaaacagtgtccagggccctttctcaggtatcggagtagagaccgtgttaggacctctgtggtccctgacttttcacctgcctccgtgctacccccagggtgcacctgttgcctaaaatggagaatccctgatctaaacagtaaactggctgttcagaagcatatcaaggaagagagtcagcatctctcaaagccattctttatttatttattgggtttcattttatttattttgctggtattagatgagtccttatgattctgtaatttaatttagcaaacatttattgagcatttgctgtttcctgggacgagggatgtgggagcacagagaagaataaggcctgcccaggcagttcaggtctaactaaagagttgcaggacatgcggaggaacacagctgagccatgggggtcagtgccctctgtgggagcaggacagccctgaggggcacagagcactccaggaccaagtggggctttactggaccaggagagaaggctcttctgcctggggaaagcaagctttgtctcagtttgggaggccgcagagacctgggttttaggttctctcaacattgctatggctgtcagccagttgtctcctgcacaggtcttcacacactggggcccactactctctatgacagctcccaacctcccacatgatgtcagcacatgagtccatctgattccagggagtttgaaatgcatggaggagcttattttgttggcttgccttggtgttaggagcttgttgttttcttcccccatgtaaactaagcttttacctgggctctgaggcactcccgggttttcagcactcaataagcaggtgcaggggtggggagcagccaggtggagcctgttccacaacttcctgctcacttggtgctccgtgaggtagctgcccgtgtcccagcaagcaaggtgacatagattctgaaagccgcaggttgatggagctattgccctgagctgactggtgttcactggcagcagcagatcctgtcccccagtgacagtgtaaagcaccgtggctttcacagatttacacctcctgcctttcgatggcaggtgtcagcctctctctcgacatttgctgaaacgattcagcctttttggatccacagtgcctgtgccaagaaccttacaggaaaggtacacacagcttgagaacccgtggaagtctgctgggctggggagttggcctcgaggagaggggctagggaagcttattcccctgtttatctttttggggaaagataaaaagtggacttgagggtttaaatctggggttcccttcaaggaattagatgctggttgccgaaaggtctttgatagtgttcattcaatgctccctccctttgtagtgaggctgtttcagccaaggcaggggccgtcctgccagtacttgggcctggaggccctcaaggctacagacaatgagctgactttccttaggaaagtcaggagacctgaggaacacggcttaatggctctagaagacctatcccttatttcacctctaaataagggtgtcagcaatctgggtcatttttttttttaaatctgactttattctttgtcttcttaatagctccatttcagctgctttaggacatcaatctcatgactccaggcatcgccctacttcagagccacccagctttgtgtgctctctactcagctgtccccccaaagtaggtggaccagaataaagaggagaaagtaagagggaagtgaaaggagaactttcctttcagaccagagccaggcaggccagagaatcaccttctgtggcagccgagcattgctcacccaggcagtggggttctgaggaccaccctggcctcgtccgtctccatctctcatctgtcctcctgcttcctgccctcgcctgctgttccccatctcgaacctctaaaaaaccagcccacagcccaggggggaccaaagcagcagtgtgggacggcgagggggacccatgagtttcctcttatggtcctggctgtctgtggggccatgaccttgaggtctgtagctccccctttgaagtccttcatatgctggaagcctctcaccttgtgtgtggcgcagaagaaaggattcccagactaagctcgggccttaggaaatctccaaggcgcgtgggtttgtgtggcctccaaggctgcattttctgtgaggttaaatgttcacaaaatttaaggggtgtgaggaactagtgaggaaagatttcattttgaggaagttgcctgggcgccatcgagcccaactcccactcgccatctgcccaggctccagaggcagctttgggaggggaactgtggtgagcacgtcgtggcctcctggaactggctgctcccacgtgtcctgaagaaggtggggtctgtgacccagagaggagcaaggggagtttgccaagaacagacatcctctgccactcttgatcccctgacgcacacggggcaagctcctttggggtcgaacagaacagaccagttgtttggagtaggtcagtaccatggggttctgcacgcgcttcagggtgccggcgtgccctcgaggctgtctgcaggatgctgtgtgtgtgcagtgcacattactgctggtgggagtccatagttctcaaaagcttttcctgactgccccaccctctcaaaaaagtaaagcaggccgggggcagtggctcatgcctgtaatcccagcactttgggaggccgaggtgggcggatcacgaggtcaggagatcgagaccatcctggctaacacggtgaaaccccgtctctactttaaaaaaaaaaaaaaattagccaggtgtggtggcgggtgcctgtagtccctgctactcgggaggctgaggcaggagaatggcatgaacccaggaggtggagcttgctgtgagccaagatcacgccactgcacctccagcctgggcgacagagtgagactccacctcaaaaaaaaaaaaaaaaaaaaaaaaagtaaagcaatactcatttagaggaaaagaaagggactgcttctgaccctccttagcaggacttactctgagagaggaaaagctacaaggacacccacaggctccccctgaccttggatccaggtttccctcttcctcagcaggtgcctgggactcccattccagggctgtctcaaccccattgccttccctgtatcagagagtccgatacacaacagaacccttacacaagtaggcgctcggtaaatacttgttgaacaaacgtggactctgatgtgaccactgctaagaatagtcaaagaatgacctcacggttcccatcgtcaaatgggacctgcagaccacagcccatcgtggccagcacggctgtcagtgtggcctgtggtcaggcagctcatgtggctctcatgcctttctctccctaatctcatgtcaccaatcccacccatcctgtattggctcgggtttgtttttcttctcctggtgctgaagtctggtgtggtttcctttgcactgttggttcagacagttaccttatcgctaaaggaaagctcccaggctccctgggatggggacagtgtctgacacacaaggacctttcaccccgcctctcctaacagatgctcttttgctggatattttagtagttcagccactgggagaatctttgcagccaggatggcctcacagccataggctctatttttaacaattgccgacttctgcaaacctccattgctatcataggaccacatggactctggggcttccttcctgctctttatctccgttgccttcagtggctgtgcagtgcaaggttgacacaggcctgctgagcctggcccttgcccccctcagcctcacgcagacactcttccactggtggaagccttctgggaccctgcgtgcttccttctgcagttgcagctgccagcctgcactgtagctgcctggtcatttcctgtctcccctccagcaaggatttcgtgtttacagcacagtacctagcacatatcaggttcactcattcactcaaagagcgttagctgaggacctactatgtgcgaggcatcgttgtaggcacctggggtacacccgtgaacaaagcaggccagaaccaactgtcctcggggagctcacattctagcatggaagacaaacagcaaataatacacgtaataaataggtaatgatacagttaccaagtgagaagtgctctgggaaagcaaaccagatgtgagaaaatgggcatgctcagtaaacccacgttcaattgaatttcacgatggcatggccaagtgggcacacactgggaatcttcttgccccagacacgatatttgcactatgcacaatgattatgttgggtgaattttcctaaccaaaatttagtaatatcagatacatctcaatggatctgtaaagaacatattgggatgtaacacttcataccagtcagactagctaggtgtctcggtacttctcagtcttttattcccggcatgcagagaacatgtttatccagcgtacttagacaaatgcatgtggctgctgaagctgcaaagcccaagggctgagggtattactatcccacctgcctgaactcctttgaggcccctgggtggaaatcgtggggtggttatcaaacttgagcatagcctagaatcacctgggatggttaatatgcagactgtgggccaccctgagatcttgggggcatggggcaggaatctgctttgttcataactctcccagatgtttctgatgctggtggtccttggaccacactttgaggaacactgctatgcaaccttgtggaggtacatggagagccacacacttgtgttgttacatttgaaattgggagctatggagagaacaatgtgatcagtggtgctcaagcatgcatcagaatcacctgtagggccgtcaaaacgtgggttgctgggccttccccacagtgtcagggtgaggtctaggtatgtgcatttctgaacaggtccccaggtgacgctgaagctgttcgtccgtgggccacactttgagagccattgatgtgaatcattcaggacacttgtgtgccttggaagtttgggtttctatgagctagtttcacaaggacaaagttgggtgcatttttaggaagccagaacttaaccctgtttagtcagaaggcatcagaagagatagctttgagaaactaaatcagaataaatttcctctgatggaagcacagctctgcaatttatcttcacgtccaccctccagccagtggtgagctaataaatgtttaagcatctcttcttagggtcagcgggtacagggggctgatttattgcttgcctatctctgtggtgtaaatacttccaccatggtcagtttcaagctgccagtgtggtcaacgaacacggagctgggaagagatgtgcacggtgagctcccctcagcccccaggagccagctccggcgcaccactccctctggctgccgtaggggtttgtgacctttcagggcgttctccaccattcagtagttacagtcagtttccacattaaggaccatttacccctaagctgtggttgcagtcacaggacccttctctgaatacataaaccaaaatgattgcctctcccagccggtggcccgcagtacgtgtgaagcactggggtttagcctctaacttccgggcttggcccacggtccaggtggccaaggttatcttctgaggaaggttatctttcctcacacctcctctgtggtttcagttctccaggcctgtcagcaggagctgacgcacttcatacaccaaggtcaggggcctccgggtgcaacagaaggcttaatgtccaggcaaacccaagtgagttaaaccatcccatgctgaagaaattattttttgaggtgacccattttctcagacaagtgaatagaaaacattggagaaatgtttctttttcagaaaataaaaccacagagagacagagtgattcctcttgaggcagagcgggccgaggtccccttcggtcacaggagttcctttgaacatgggcgatgccctgggtaacacgggtaacctggtgcacatgaacaaagcccacgttcagccccgtctgtcccctcccaatctgctcacacctgctgcctgcctctttgctgtaacccaattctgcttcttctttcctaactttccttcgtctttccagatgcaggacgctatgggctatgagttaccctgggtgtattttgtcagtctggtcatctttggatcctttttcgttctaaatctggttctcggtgtgttgagcgggtaagctgaccgtttctatgtcctctccacaacgcagccgagcaaggtctcaggttccactccgtacatgcccggggtcctcagggatgggaccctgacaggcccaggaaaaccacaacaaagcctctgttcaaccacagattctgacccattggccaggcaggctgtttggcctctgatttgcacctagagggtccccggatcctggcgctgcgtgggtcagtgtctcgggagccggggaccggcactggccgtgctcggttgctgagtgtgcctcactaactatcattccgttcttccaggtcaatgatgccgtaggaagggactggccctggatctattttgttacactaatcatcatagggtcattttttgtacttaacttggttctcggtgtgcttagcgggtaagcaggaccaaggaaaaaggtcttgatttttccatttatttttatttattctttctgctattcctggctgtattctttttctggctctgatgaacctgggataaggggtcaccacaggagccttgaagtggatgtccttgtcctggctgggtaaagggtcagatgtgccactggtcttggtggtggacaatggaggagagctggcttcaccacaaaaagtgggtccagctggcccctcccagcctcaagtagctgtccaggcaggcagggcacttctccttgtgccttcgtggcctctggtgaacaggcctgggtaagaaaagactggtttaaaacataaacaaagacagactcaaaatctaattctcattttacttcatagactgagcagtctatctctgagtttccttttctgaatggaaaggacccttaactgtttaaagccatatattatttaagaatagaggagatgggatgcaatttcctctaactttatatctagttggctgcaagtatcacatctacctaatttcagcccttgctcagatgaagttagaagtggtagaagtaaccgggcatggtggtgcacacctgtagacccagcaactcagaaggctgagacaggaggatcacttgagcccaggagttcaaggctgcagtgagctatgatcgtgccactgcactgcagcctgggcaacatagcgagaccccatggtagaagtagcacgtggttggaaggaagcacctgaggatggccaccttttcaccatggaaacgcataggatatttcctcaacccactttcttcttcagaagtccacaccagccatgccaaggcctaacacctaaatgctcctggtgacctgctcatgggtaacccactctgctgcctttgccacttgggggaggggggtaatctacttctactctgcttgagactggtcagctgctttgcagagtcttccctaaatgtctagagaggttaatgctgggagaaatttaagcataaagacaaagattgctctccactttcccccagtacctaaactgggaatcgctactcccagctcctacagctgccctaatgcagttcagagcagtgggcttggccttcagagctgcgtagaggaaagaatctcctcccagctcttccacctcccatggagaatggcccagtagagaccttgatgacaaaatgccttttgctaaggtgaggccacacaggagactagtgccttccatcagggataacagtgatgagcagaacaacgtaagtccctgattcattgcctggaaggtagagaggttttcagttttatgttcaaacacaagaaaatgcccatgtgtttatatgtgaatctctaaggaaaagattgaaaaaatcaacctcatcaccctgaatcaaagcagaaattgaggcatcccagctctgcccttgctgggtacataatgttgggtggtttcacctttttaaatcttagtttccccatctgaaaaagtgaagctgataattccagtgcataggtggctgtgatgatagaataagatcattttcagaatacttaacacagtggtatataataagtgcccaataatggtgctatcattacaatgattattatttacttggtgcctgttataactagaagtatagaatcatcaaatattagacatgctccagcctttcctcttaaagatgaggagcgtgagcccagagatgttaagtgatttgtacaacgtcacttccctggtaagtagcagaaccagagccagccctcaaggcaccgcctcccatgagatctatgatgaatgagcttgaactgcaacacaagccacagctcaagacttttaaaagaatgtaactccactttcttcccctggagactgggaaccaaatctgagcaagtaaccccccaccaagagcctgaagtggagaatgagggctgggccctgagggtcctccctgagcagagcgtctgcccaggaatcaaagcagtgaagtcaagtgacagaaactgctgatgttggggaagaagccactttgaaggccatatcttggctgactcagcctaaaagcgctagggtgtatttagacccctcaccccaaacctggagcttagtaatattcaaaaatgttggttgactcagaacaagaacattaaggctatctgacctctgaacttaggagtctttgagtcgatacgctggtctttcctggagaccttcgccagcctctgtttcctgacctgttctgagagctgccgtctgctccttgcagctcctgaatcactgatagaacatctgccaaggcttccttggccaaaggtctgccctaaagagcaaagatgtgtgtatgggcgagcacctcccctttctggtttaaggaggcctctcctcatgtgtcaagggctggccactctgaattggttgcccccgccccatgcagtgccaaagctggaatcagcttctgttggctgaccactcagaggcaacggtttccagtcagtgtcttgattagccaggaccgtagaatagtcacacacttactgggtgcagatgtagttgaccatgcagtcaaacacccacttattcatcagacttctgattaagctacacttccagaagcattcaaaaaggtctcactgctccatgaaattgactgtcacattaacagtcactagcattctctgtgtcaggctccgtgctcggcgtgttcgctagattcgctcagttaatgctcatggcaactcagtgagctggtgctattcctgtgtccattctacagagaaggcaagtgaagctcaccaggcaaaatgacctcaatcccagcaggtgagaaatgcaggatgcagagctgagcccaagcgatgtgaatccatcacttctatccctgacctctgtggtgtactctccccaaacccataggacgggttcatcccatgcttttaaatgacaggcgagaaatggagaggggaagagcagaagctgcagtaggaagggtgagaggagcgagcaggcaggcacagaagcaatcagcacagactgcgggaaacagccagcaggcacacagaatcccagcaggaagctgcgaaggcaaccgcccagaggcctgcagcagggctgggctgcttagcagagggaccggcagccctgcagatcttcatggcccttgaaagagagcaaagccactaactgaatagcactgcagtcttggagccttctgggactgggagaagtgggtgtgaaaccctgcattccaacaattaaggataatatgattttatagccctgcacagtaactcatcctcataaattatgtccttcagtcactaaggaaagattgaacggtgcttggtgtgttgtgcttgtgaaggtagagaagatgactccataaagcttccatttaaagtgtggaaattcagggctgcgcatggtggctcatgcctataatcccagtgttgggagactgaagcaagagaatcatgcgaagctaggagtttgagatcagcctgggcgacatagtgagaccctttctctacaaagaaaatattttttaattagctgggcttggtggcagcacctatagtcccaggtattcgggaagccgaggtgggaggatcacttgagtccaggagtttgaggctgcagtgagccatagtcatgccactgcactccagcctgggtgacagagcgagactctgtctctaaaagtaaaaaagaaaaaatttttaatggaaattcaaagacttttggccctgagagggttagacctcttctatctggatcatgcacacatccagaacacctatttctgatgaggccagataaagtcaatataaagaatagatattaaaggattttttcaaaatactttattatctgatggtcctcacattaaccctatgcaagacataggactggtgctcttatggataataatcagattatgattacttcccctcagaaagctcaatctccagtcgactagaataaagacaacggtgatgatgacattcttgaaattgcacttgaagctgtaatgaggtggaagcctctggactctggttgctttttgttttaagcgactgcaaacagagggcttgggaagtgcgcctccagttggcaagaggcccacgatttcttacataggtagtcatcccatcccttttcccactgggagatgggcatgtcttgtccccaaaaagcagaggacccgggaggtaggcattttacagccaggaagtatcgctggaccatggcccacagttaagacacagtatctgggaccagaagaaagcaataaaaggtcaggacacacgtgccttgtgggtgggagcagaagagatggcccaacatacacagtcatgttatggaatgtaacccttacatgttatggaatgtaacccttattcatgacggttacattccataaagtcaccacaaacatgaagtagtggacactgagacgttggtcctgaggaactacagagttgtttcctgtgagcctctgcccacattttgtcaaccaatcaatacataaccttgttttaagtgtgtttctatttaaagacaccttatttaatatatatgattgattcatgaacattaaactcctggccactagcaccgtaactcgcacctgcgtgaagcttatttaatgcacgtgttttctctgtgcagcacatcatagccctcctacgcatagtgacacaggacggcacttcagcattatgcttggggccattttaaacagcaaaatcaccaacaaaaagcacaaaaatgagaaaacatggcactaagtggacggtgaaaaggacacctcacagtatgagagctgaattgggaaggcagaactctacatgccccttgtttggcctcagcgggaacatgtagagtttttgtcatctgcacatgtccacagatgactgaaagtgccacgagtattgattctggagttacaaacacattttagtgagtaggcgcatttgtagatgtgggatccacaaataaggagcctgggtggtatcgatgatcaaagggcctagcacacctcaggctattggttggattccacacacaccgccctgtgcatgcttcacatcgctgagccctggcccctggctctccacaccacccctcatttttcatgttggccattgctggcgagagatgcagtcctgtctcgtgacaaatcccacagctgtgactgattgtcttgccggcttcagtccctgggcccagtgcagactgtcaggctggggctccatgtcttcattagctcagtccccagagcaggaacatggctggcatccaggcaaggagataaagagagccaggcactgccaccagcagatcctttaccgtgggaaaccttggctcatcttccatccagcctcaagcctgtctgtgcctcatactccatgggatccagccatgctccagatctgactaaagcccttctccatccctctcacactcccaaaacacatccttcctctatgaggaaaattatcttcaagccaggcagaatcaccagcatacctcgtgttctgtttctccccctgtaatgtttattttagatccccagaggccttggggtatagatggtgagcttcattccatgggactgttgctgtaaaacaggattgggccaattgtccctattccagttgagtcccagtcctattctcccaattccaaaagaaggatgggaaggtgttttgtaaccagaacttgaaccctctgcaaagtcactcaaaagagctgaagtgagcccttacaagggactgtgaagttcagccccttgcaactccaaacccaccccagaggggtgcaaatggaggtagacagaaagacagtcaagagaggaggccttgaaacatagtttttggagttgatttgcatagggagaaaaatgctatatgaggttactgtctccaggagcaagactaaggccccgaaggcttaaccaggtacaggggataagaggttaggaggagaggggatggcatctctctatgatcatccccagaagggaaggagcaaagtttccctcgccattgtgagctgtcaatctgtcccttttccctagcataaaagtccttgggaaaaaaatgaaggtacccactggttggcaggaagcccaagaaacagcaagtacaatccaattagaattggattcaatcaaatttaagaagaaaattcaatccaaaccagagcatcattaaggcagcagttgaagagaactggttagcttgacagcccccacattctcccaattaaaaagttccctaggccccaccccagccccaactccatctcaccataaagacggtgcatgctgaaattagtgctctcccaagtggcacaggccaaatgcaagcactaggcagtgcaggtagtgatggagctgccccacatgacagtagactcagaagcagagccctttgccctcttatggtttgtggtgctgtccctccttccatggtgcctttcctagagtgtggcttcagcaaaaaattctccaaggtgcttccagcagcctcgtgccctgaactgggccttcatgggtgagagaggaagacatcatggctccaagaattaaccaagatgtcctatgcatgtacacacacacacacacacacaaatacacacatacatgcaccaccaagggcctcattccccaaagactgcatatcaaaaccaaaaatactcccctatgcctattttgcaagaaaaggcacagacttgctttgagggttgagaattcactttgttgatgattgccttctcctgccagcctcctccttgctcagaaagtgaattcgaagtcagagagaaaattaggacagaatcatagaaaagaaatagttattgtgtcagaaatttttcaataggccattcttccagcaaatcccaccccagtttcaatttctactcattattactttaaatcaaatgcatcatttaacttttatatcatcttgattttatgtatttttctattctgattggatttctttaaaccaaaagggcagcccccaggacattttcttgtgtttggaatcttcatttgtcttcatgtgggagagaaccttctctagattagaaatccttccaggaatgctgagtggcaggttgagctcgtcataagaatagagattgaggacattaaatctcctgggtcccaaatcagtggtatactggtaaatatttaacaattggctctctatggggaaagccctggttttcagcatttgccagttaccatggtgtaaatattcccactgtggccgatctcaagctaccagcgagacatccctgaagccagagttgggaagagacatgaatgattggctctcaggacctggggcgagtgagtgggctttggtacactgccggtcctaaaaccttgtgtcacctggagacccttgggagaattttaaactaccactcaatactgggtgggatggaaatgcatgttctggaatggtggtggaggtttttagttactgcttggaacgagttcccaggtcttcggagaacagttattaaaaagcaaagcctgtgatcatgatccaggaaaagagggagatggacttcatccatccccttaagcctctcctggccagtgtcaggaatgtccccttactgacgcttcccatcgaggtgatagtagacctaacctaggctgactagcggagctgtctgtggaaagtaggggcgtgtgggcaggtttctccctgcaaagcaattaagactcttgtttctccttatctccatctctccttccatcctcgacccttctcggtgctccctccttctctgtgctctcctgccctgcccctcctctcactctcaccagagagttttccaaagagagggagaaggccaaggcccggggagatttccagaagctgcgggagaagcagcagctagaagaggatctcaaaggctacctggattggatcactcaggccgaagacatcgatcctgagaatgaggacgaaggcatggatgaggagaagccccgaaacagtgagcagccgtcttcttctgtgtttgggctgggttctgggggagaggagacagcatcggggtcagcacagaactttgaccgccaccctttcttagaagcccacggggtgccttcctggagcagcagttatctcactgatggcagtcacttgctgcacacagacatcggtcacatgtgggaaatcatagctgtcgatctagaaaacctcatgctccttttagaatatttcaccttgaaagactgttgagattttgctaaggcagaggcttttttaaaatcagagatccttctcctccaggttccacctctttgggcaggggcacaggcttcccgtttgaaagcgcaggcttgtttaaaaggaacaatgtgtgccaagcagctgcctggaaaactttatacctgctcaggattccttccccctttgcagatttccatgcaccactgagctttctcataggaaaggtagtgaaaggttttccttaagggggttagattcaaagacctggggaagtgctaagtgggagtgttgggggaagcccagaggaattcggcagaatgcaattaggtgatggaagttgagccaattcccttccttgggggttcacgtggccccttgttggataggctgtggctgagatagaaatgaaagtgatggatgacattgactcacaaatacgtaaaaaatgacggatcatgaaaattcaggctcttaccagactagctccatggttctcaaagcatggccgctgaccagcagcgtcagcattacctggaaacttgttagaaatgcaaagtcttgggccccactccagatctattgacccagaaactgtgggaatggggcccaggaatctctgttttgacaactcccccaggtgatcaagatgcatagtaaatttgagaagctttgggttaactctaaccactctctatatctcatttggccttgatctctgtgactcgaatcatactctttctttctttttctgtgtgtgatatctttctctttcactatacatgtttgaataggtgcatttttgtcctctcaagcagccttacttaaaaacagtttcctaaacactgagcatctagagtactccacgaagcaaacaggttaaagagccatccagggcatttgctgcgtggagtcatgctggtaaagacagggaactggaacttcaccctgagcagagaggatgatgagaagagctgccaggagcagaaacaggtgcaggaagaaaggacgaagatagccaaagatgttcacgggagcagaatctctgctccctcatttcaaagatagctttaataaatctatcaactgctccctttctgataacgctgctcaaggagcaaatacaaaattaaagcacacaaacaacaagggactgttaacaacataatgtagtaacctaaggaggcctttgtgctccattaagtggttttgcaagttggaatacagggcctttgatggattataacaatgagggtcttcctggaaaaatgcctgacaccttctattacactgttgatggaactgaggagtagttgattagtttgtggcactgagtggtatggtaaataaataagttggcctgtgagccacggagaagcctacctctaaaatgcaggaatttgtatgctggctcctggctccaccctaagtcagagcactggtgctaccttgtgactgacggtgatgagcatttctgtagcgcgtgttattgaaaacctgcagtagccactacacgcttagcagccagtggttatccaccgagataacagaacgttgctattctgttctccgcctaaaacaggagcttccaagggagagtgtgctgcttctccatctaacccattaaatgaataaattgttaggagagttcccagcatggagtattatttgctgctggagcagatcacactgacaaggcccatctacccaaatttcttgacaaactttgagaagagcataatgagctgcctaacccaatagacagtctcgctaagattttcctaagcctagataaggatggccttagactctggagactggtttctctcaccttgcactgcttccttacggctggaggagccctgggggtctgtttcttgtcctaagaggactggagtgggagcctggctccttcattagtggaaatgctaattagtgggacagttccaggggatgaggcaggggaatgaatattttaaaaagcaagatgtagagagtaagatagacacatgcaatgaagtggaacgtgagagacaggagtggagctgggaagagactgtgtctgttggggaagtccaattaaaagtagaattgatgtgatgaaatgattaaggaatcagaggcctaattcacttgcaaaaaaggtaagacagtggctcagaaactatcttcctgtcttgagaatttcatagattgctctttgaaacaaatacaaggggagaaatcctgctacgtttgaagcatgtgtgtttcaattaccgtaatatcttagcctttgaaatttctaaaagactatagtatggtatgtttgccaattctcttcagctcaaaagccaagtcatcttttaagagaaaaggccgatcactcttcatcagcagctgtggtgactccgcttctcccctgggcagcatctggatgcccgtggtgtgaggctggggaggtggggctgagtgcagtgcaggagctgcttggtgacacccagcatatcttaggggagcccagggattctgtttccttagggaaagctgcaaaagccaccaaggagtagaaaaaatgggctggaaggacaacagaaagaaagcgtgcagttggggacatttctctaaatattagtgtaagtgaagtggcccgtaagttatatacaaaaatatgttccagttcattcattcattagtccacccatccacacatgaaaggtctgctctctgccaggcactgccatagacactggtgatagagcagtgaacaagggagtcaaaagtccctgccctcgtggaacttagattctagtagagagacaggtggtaaattaaatagcatgccagagaggggggaagcagtgaagggggaagagtgttgagaggttgtgattttaaggggtcagccaaggaatgtctcacgatcgaggcagcattggaataaagacgtggaggctggaaggaaaagcaccatgcagatagttgggaaaggagccttctagaggctagcgagaaggggccaatgagaaggggccacgctgatgaatccggagctgaggaggcttgtgcagctggagaggagggagtaagggggtgaatggtgtaaggtgaggctgtgggacccaaggagtagggtatataaactattgtgagaacttggctcttactgggagtgaaccaaagagcctctgggtatttaattgctattgagcagagaagcaacacgatctgacagacacttatcaggatccgtctgcctgccatgtgcagaatggaatgaaggtgggccagggagaggcaggggtcccgtcaggtgcctgctgcctcaggagatgctgggcctggtcttgacacccatggaagtgataaggtcagacttcaggatgatgtcatttgcagacgcgtcagatatgggatgtgagagagagaggtagggcattttccaaggcaattgtcctaaacgatggcaagaggggaattgtcatttatggatatggggaagtctgtgagaggaacgggtgtcagggcaggaggatcaggaaagccatctgagacctttaagtttgaagtgcctattaaacatccaggtggagatgttgagtatgtaataaggaatgaacctctccaggagagagatctgtggctgaactgtaatttgggaagtcaacaacatatagaagatacttaacccctggatctctggataagatcactggggtgtgagtgtagacagaagtgagatgctgtccaagaactgagtcctagccctactgatgtttggagattgggatacagggaaagaaccagcaaacaggactcctaaaggcatggccagagagacaggagggaatgcaaaggaaggggtgtgagcgttgctgctgtgactggaaactgaccattgggcttagcaatgtggggctcacttgctggtgccttaacacaggctgttggatgaaatgctggggagaaagcttcctggcaaatcagccttaccctgtgcatctctcgagtctgcatgcctcctgcaatggcatggagcgttgctctgcaggcttcttgcttctttggcatggcccagcttccagccatctgaagagtctggccatcaggaaaccagaaagaggagaggaggagactcacacagactctagcatgcccatggcctcaagacagtcagtgtctaaagcttagcccatcacgatgttcccttctacagcaatgccaatactagccactgcctctgcaatgggttacagtcttggaaaaaagaggacgtgatactcaagagccatttcagagccaaaaaggcaaaaaaggggcaagaaaggggcatgtttatgtactgttgccctggatgtggcttcctaagtggggcagccaagagccaagccccttttctctctgggtaaagactaggataatgttgaggtctccccactctagtgactgcttctcccctccctctgagcagcagtgagaagcccctgtgaagggacccattgcagaactgtcattagtgcagggttattgtcatcagcagagatgcactgctcaaagggacagggctcatcttccagctccgacgttaaatctaatagaaggtcagacactacagggagaagccataaagaaaaagagacagattctcttctttttcctcttcaagatgaaaaaacacatctattaaatatccatccttacaggaatctctctttcatgtcattaagacaacttaaatgcaccctggctctctaaagcttgcagttcaatacagacattgatgtggatgagcacgtaaacagacagacagacagtggaaccaaaatattgaatttccatgcagataagcaggattaaatatttaccccatggtatcgagttatgtgactcgggagccacttttgcagtcatcaccagctagcagagccacgtgcctgctgcctgcccaacagagtctaggatcacatattactgagacaggaaattggaaggcttgtaagagctgcaggttgcccacgatagggccccatgtggcttgagagcagtaacctgaatatcgctgatttacattattttatatgtgtcaagggcatgtacatagttatttgatctttaaaaaaaaatcagggccgggcgtggtggctcacgcctgtaatcccaacactttgggaggccgaggcgggtggatcatgaggtcaggagattgagaccatcctggctaacacagtgaaaccccgtctctactaaaaatacaaaaaattagccaggagcggtggcgggctcctgtagtcccagctacttgagaggctgaggcaggagaatggcgtgaacccaggaggcggagcttgcagtgagccgagatcgcgccactgcactccagcctgggcgacagagccagacgctgtctcaaaaaaaaaaaaaaaaatcagtacgatcagtatttatctagatctctcgatacctacaacacaatcccatgtcatggcacatacgagtcacacaaacacatgtgaagcatctggctcagattacatgagaagacatgccaatatttgtttttgtccttgattctgttcataccttgcactgttgagtgatcatgctgccaggccatgaagtgagagcagatccttaaggcagagcctggaagtagctcctgggccttcacgttaactcttagctggtcctaatcagagccctggaaactttagtgctggaaagttgctggagagatcaggtgaggaaactggagcccaaggtgggaaacagccacctgcctaaatgttactgaagtcagcactcaaacccagggctccagattccccatgcaggaccctgcccagcagaccacagtgctccttacagaaggcttcttggatacccaggcagcagcactccctaactgtccctctgtccccctagctcttggggcacatccccatttatcttgtggaattacatccacctctttacacttgcttgctgggctacactgagaggtccttcttggggctgcctttaattcaccgttgtgtccccatgacctgacacaggccagagcatgggaatgtcatggcacatatgagtcacacgaacacacgcaaacgcgagtgcatgccatatgccagttttggcaaagcaccttctgccatgctctaagctgttggaacaggtgagctcacactgcccctggactgagttggctcattgttctgtctgctcagaattgacttccttgtggcatcaccgatgacatcctttcaaagtcatttcctttcatgaacacggttgctttccaatagccctcagtcactctcaactcttggaaggcaccatttggaaacaggcgaataagcacagagccccccatacgtgtggacagtggcgatgacagggaaattgaagtgccgtgggaaagcattgggagttcttaagcaacgagattttgctgttccctgaagaccatggtggctagtggggctgtgtactggggctctgcagtgaaaccactgatggatatttctggttctggtagtcatgaatacccatgggcgaggtcctgtggacttggtgttgtgagaggcatctcacccaaagcggggcgtgggggccatgttgtagtaaggatccagaaggggtctgttcattggtagcacattacctttggagcacagcctggctgctgtgctatctggccccgtaagtgtacaaatgccattttcccagccaggggagcagtggaagagctatggaaaggctgtattgtgtatacagtgcgaagtaggcacgtcagcctgtttcagtgagctgtcggacacttcccaaagcaaaaccaccagctctgggcaaggcttgctaggttaagctgttgggaagccatgacagtcttctcattgcccaatggccgtgtgcttcagaggagggaagccgtgacagtcttctcattgaccaatggccgtgtgcttcagaggagggaagccatgacagtcttctcattgaccaatggccgtgtgcttcagaggagggaagccatgacagtcttctcattgcccaatggccgtgtgcttcagaggagggaagccatgacagtcttctcattgcccaatggccgtgtgcttcagaggagggaagccatgacagtcttctcattgcccaatggccgtgtgcttcagaggagggaagccatgacagtcttctcattgcccaatggccgtgtgcttcagaggagggaagccatgacagtcttctcattgcacaatggccgtgtgcttcagaggagggaagccatgacagtcttctcattgcccaatggccgtgtgcttcagaggagggaagccatgacagtcttctcattgcccaatggccgtgtgcttcagaggagggaagccatgacagtcttctcattgcccaatggccgtgtgcttcagaggagggaagccatgacagtcttctcattgaccaatggccgtgtgcttcagaggagggaagccatgacagtcttctcattgaccaatggccgtgtgcttcataggagggaagccatgacagtcttctcattgaccaatggccgtgtgcttcataggagggaagccatgacagtcttctcattgcccaatggccgtgtgcttcagaggagggaagccatgacagtcttctcattgaccaatggccgtgtgcttcagaggagtgggaaggtgacagccacataacattttgacaggagacattcatagcttcctgggcctggcattagatcagcataaaggtgcctggcagctctgccaagccatcagctaataaaggctctgctccccttggggagacgcctacttgactttaggggagtgtccaggccaaaacgataaccttgataagccaacaaactccagaatccagatggctaggtttatggtggagaatattgtcaataccagctgagaaagacaccagaagaaggattcccacaccctttttagatacctgcctttgtattggtctacctttcactgtgtaacagctatggtaggaacagaggctgtgtggaggggcctatgagcagcaggggctgggtcgggtgttgtggaggccacactgtggttttggagggacaagagttaccagggagccaccgggacctctcctgcagtttaaagtggatgtggatagagagcagctgtgttcctgggatcgctggctagccagccaccctgcaggggcagagcaaacaggctgttagctcttgaactgccaggcacactgggggtccttggcagggtgtggagcatgaaggccctcttcctctccagggcctggaggacagcatcctctgcctgcccgccagggtcccagcccaaaccagcatcttccgagcccacttctctctccagaggcttcttcatcttcccagttccccaggatacaaagccgccttcctctttcctctcctgtgcccttccacagttatcagtgcctgcgttcagtcagtcaagtcgtatgggctgtcctcttcgcttcttcgcttggacttctcactccttccctcctctcccctcacctctctccgcctggactcgcagccaccttgctgccctgccttccagccccgttcccacgcaacctgtgtaatgcagccaagttcatatttctgcagccgactgtgtcactcccttgttcaaaagctttgaatgtgtctccatgggtacagaataaagcctgaacatctctcagtatttcaggcatctccaacctgtcccagccaatagcttgaaccttatcactccctactgccctgccgcaaagccagactgcatcttgttttccagaaacgcctgctgctgtcctgtttctgcacctttacccatctcccatccctctgcctacagcacctgtttcctcccctgctcctccgtggcctcctagcccaggtcgaagagcacgtcttggctcaggcctcccagagcccccatctcaggacaggcactgtcagcactcaaccctcacctacccaccagtcggtgggggtggcccagccgtcttgttatatagaaagctcttgggaggcagcagcgtgcattggtaacttcttattcactctcccactcagtatgtagggcaatgatttctatttcacagacttcccccaaaaacacataatgaattgaattgaattctcttcggatcagagaattaaggtctgatagccctatattcatacctagttggccaaataccatttttccagtcttagccatgctcatggtagcccccagagagtgtattgtggttgacagaatgggcagaaatgatttggcgttgagaaagtgggccgagaggaaagtttggaaggagttagaattatatagtcccaggagaagagaaagccgggagtcgacagaacagggacaaagctgcctcatgcccacatactccccgtaggaggggtcattgtttcactgtatggcgtcaacttttagattctgagtttggatcatggatacatttcagccctctggggctctcctgggctggggggcagaggaaggacaggggcagaggcatgagaggggatgtctttttcttgcatggaaggtgaagaaggcctggatggtctcctttcatcttgcccaagatcatctcacatgggtattgtttgccccattttgcagatgggaaaagtgaggctcggaaaagttaacgtattcacattgttcagcttgtaagttgcacagttatgtggccgttgctccctccgtaccatgctggtctctaccacaagccccctcacgaatgcccttctcttccaaccaggggaaccagaagtgggccctccagtcccccagccggaacagcctgtgaattttccttggttgttgcatttatcgcttcagcctaatatgcaaagcaggtggacggagaaaggaggaaaagagcggagatggggcgggagggcgggggcggtggtgctggtagtagggcatgggtttgatttttttttaagttgaactttatgattctgagaactctgtttgaagcatggaaagaagttatggcattatcttgctcacggaaagaaaaagcgaactgaggtcaagcgccatccctttggaatggtttaagaggcagttttgtttggaaggagatgtgtcaattccgtgacctatccgatttccttcagttcagggttccttgggactggcttagaggagggtgttgatcagccacaatgctctggggatgggagttctagcttaccactttcctgccttggcaagtacggtgtgaggaatgtcatggaaccgcctctgatgattctgggctgtgcagtgctacagcgtcatcacttctgagtctctgatcccaggaacctcagcactatggggccccgggggggatcactgacacgtggtgtctttggagaagtcctgtcacctacctaaagccacgggtcgctttaagaatggatctgcctgtgtccacttggccttgcccagagtaggcactcagtaaagagctgatttgactttaatttggtgctttgcaaatcgatctatacacttgggcgttaaagtagctcagcagagggatggaaggggagatgaatcatcctgagtttccctttgatccattttctccaataaccagtgctcagccccgaaacagagctgcctacactacagttacccttgcctccctcacccactccacgcttccttctctgtaaacagtgggggtaagaagctcatgccgcatcaagatatcttaactgtcagaggctatcagtggaggggagagtgacagctccagcctttctcactacttgctgatgtggaaaattatcatccagtaatggagggagattagccacgtattgtatttccatcgtcgggtgcatggcatgggaggatgatttatagaactggaaccctgaagctagtggaaaggtcacagaaagtggaatcattggcctcaacacagtggctagtgtctgagggaacctcctagagccacatgcatgccaggccatcctgagtgcttgagagagacatgggcacattaacacacatttaagtcccaacagggcacccagaatactaagataaatagacaccgtctctgtcctaaggggaattacagcctagttcaggagacagatgcaccaacagacaggtgacagtgatgaattgcagtcatgaaccaggggctggagaaacacagaagacagagagcagagtttggaagagggtgggagggactgcctgccccaagaaggattcatgaaggtgccatgtcagtcagggttggtggaccattgtaataagcagcccccaaatgaaatctcagttgcttagtacagtaaaggttacttttcaccccacggtggagtgtgagctggggatgggagggaggagagttccaccacaccggtcttcaggccccaaggctgcaccccttttgtggctttgccacccccggggcctcacagtctcccctgtctgctctgcatcgggccagcagaagagggagcagagggcctgctggaggcttcagcagccaggcctgggagtgtgggcattgctcgcgacacaccatcggccggaacacagctcccacttccgcctgacttccaggggactggcgaagagcagctaactaagtgctcgggggcagaaggactggggctgggtgggcacaggacagtgttcctgctgcagtttggcagcaggtcacacggccaaaagatcgcaaccggaccttctaagctgagggggctacatttgcaaagttgtagaagcaaaataatttttaaaagaaggaaaggaaatggaattgcacatgtttcatggtgatttgagttcagggtgcacaggggagaagccaaaaagaaagatcaggacagaaagactgggacctggtcccaaagggcctcggagtgggactctatcctgtggttaaggaggagccaccgaagagatttaagcagagggatgacaaggtaccagtttaccatcgaaaggtcactgtgcagccgagtgtggacaatgggctggaaggagagagaagctggaggcggagtgggggtcagtcagaggctgataaggcctgagtgggagtggacaggcggggaaggattggaaagagcctgcatccactgggatagggtcctaagggctggcaggccctgaacacctatcctggaggctccaggataaacaccttgtgcttttcagcctcaggaatgatggaggaggttgtgcagtgccatgcccctctgaggggctcttcctgggagttggtttgtcctgcctgctccttggtgggatccctgccatgaccctctgccccttggcattccaaggcctgtttaatacccatgaccataaacacacccacaagcagtccccttaccctaaaaggtgccacatggagaattccaagcaactcagcctattaaatccttgcctgcatgattaaatgcctcctggggaaaaagtcgagtaacaaccccaaacataggctttgatggctccatccttcaggattacttcaccaaatggaaatactcatgcctctggtgacagctgcagtgtttccagaagagatttctaccctcatataataggagagactttgtcctcttaaataactatgatacctgctgtaagtactgaactgttaatcaccgtgatcactttgtgtcgatgccacactgctagagggacagaactgaagccttgccagaaacaacagagaatctgctcaaagagttgcctaatgaaaagggtggtctgttggggagatagatggaattcttcaaaatagaaggcaattggcagcgttaggctggggtgagggtcaggagaagaggggcagctggggagagaagggctggctcatttatgtcttactttctttctatatcctggtaccaggtgctggattccttatttagccatgtggttagctccatcgccatccaaaaattacggaattctaaaaccctggggcataaagggggctccaggtccctgagtctgtcctcattccctgggcttaatcatgcatcccccgaaccacaccctaccccatgtgggggctgttggcccaaagacaagtgtctgtgctgctattccagggccttgtcacatcacactggagtgaccacctcccagctgacagtgctcccggattccgtttcttttagagatatgagcaggtttcaacactgtctctggaaaaatcacaggacatgctcaaaggtagcatcatgggaacagggcaagggccttccacaacagaacaggaagttgtattcatttccaaacacctggctttgagccgaaacttgcactttactgataaggccataaactctcctcctcctgcacccagtttgattcaccagcagggcccacacatgtggtgccatccagagtcatccctcctcaaaggaaatgatgggcaagaaacgtgtttgcacaagagtctctaaacacagcccatgaatgaatggtctccggtgaaggtagactggagtgatagagtagcatgttcacttctacatggcgctgcagagagcctaagaagagaatgaataaagaaaagtgtagccatttactcagtcataaaaatacacgtccattgcaatttagaattaatacagattagttcctccgactgaagaaaagtaaccccagcaaagatctgcagggccgagccactggacagaagagctttgataagagaaatttaaaggtttatgctttctaaatagatacatttgaattttgataaaagagaaatttaaaggtttatcctttctgaatatatatatttgaattttgataaagttattcagtgttttgttttattctacaagaaagtaaggatattaagacattttaaaaatgtctgggcagaggagcccttgctgttccctaaatcatgttctaaaaccttatttgctaagcctgagtctggttttgactaacatggcccaagtcttactctaagaacttcaatagtgccttgtgtgcaggatcacagtgtataaagattagaggtcaagcgaagacaaaccgcaggccagcactgttaaagaatgattacaactgtgctgggacttgtttgtgtcttttgcttgaagtaatagactagatctactctcaacaacttactgatgaagttgaaaagccttaattatttgcttgacaggctagctttaaaggaaaaagcctttgtttaccttctcaatttcaagcttcaaatcagcctgtccaaccattgtatctcatgtccatgactcatgagatatgataatggtgtccactgtcagttattatgttaacaaaattatctgaaaataaccaaatgcacacctactaacacatgcacacacaccaaacacaggagcaagaagaaattaaggactcctttcttgtcaggaatattcagaattagagtctcaatgaatttactaatattcgctaaggtcagctgggtccagctttgagtaaaaagcttggcatgatgcttgctatgcctggcagaggcagagaaaaagatccctgctgtccccacaggggagagcatctgcttgacatgaaaaagtaatgtcagtggtgggtcccagccccttggaccacttctgcattgactaggaagctaaggggtcagttgctaaccatcaggccgagcatcctaggttttcatcaagaagatcccaagcttcaataaaaactgcagagtttcttcttgtacctcttagatggtatacaatcatgtccatgaattataatttccataatcccttagtaaactaattctattaatctattaagtcctaccccttgattagatgagttgagaatacagcaatctgggatgaatgaccctcatgttcctctcccaacaggatgccagagtttttagtctgaacaattgtcgtgtgctatacaggaactaacaggagccagagaaaagcaggcagccagacttcacggccccacttgatagccagtctgcagttggcctctcccagtttccttgcttgtaaaatgacgggggttaggtcagtaaaagccccttccagctttggaatttgtttctgtagttctcagttgacacacgttagctttagctccaggagcctgggccaaacctgatcatttcagtccatcagaccccagaggaattcagttgattctagcttcttaagtcctcagactcctggaattgcacttttcctcctgcaggattgcctgcaccctgaaagccagcccgttcttccaacgatcctctgcacacttgtgcacaccctgatctctgcacggaaagcccagccccaccatctgccttccgaactgccatgttaccaggccaggcttgccctacccatcatgccatgtgccaatcacggagacacaagttttgcagcggagaaagcgtttgttcacaaggcagccaagcaaggagatggaagagcaggtctcagatccacttccccaaagatggggttttagggatatttatgggatagaggagcaaggtccaaggcatggggaaaggtgattgggggtaaggaaaagtgaggccgtcggttatctgcgcaagtatagtcaagcttcacagctcttcctgggattcaagttcacaaaatggcatcgttagcgtgatctgaggatggatgtttgggccctctgatgccaaaaggtcgcccattggacactcacgcaggcccagttggaggattagtggtctgagctagcttgaactggacaagagctgaccccaagctcttgaaaaatgacttaagcaaccattatcatggtgacttatacatcagagatgttatctgtaaggaggcttgtagaagtttagttacatattccttaactacatgacttttagctgcatatgttttaaaatcaactagaaaccagtgaggcaagttaggtttggtgacctcattaggttagcccttggtttcaccaccccaccttcaaagccccatcaaccatcccttccttttctgccttttctatcctcaccacctcttctccccagcagggtcttacccgctccttcatgctcccagaaaccccattccacagctgcatcatagtacttattgtatgtgatctgtagtgtctccctgtctgctgtattcattgcattttatctgtggcattcatctatctgataccgtctgctgggtagtacatcttgaatgtggggacttttgtattaccagaatcccatacagatcctggtgcataggcaatcaatgaatattggttggaaaagggtttggaaattgggggataaaagtagggtcttggcttggaagtccttggaattctgcctctgggaatggatcacttaggcctgctttgtcactttgtcagatctaaaacgaggttgggccagatctgatccagcagaggatatgtaattaaccaggcacataaattaatttttaatcttccattccttgcctgtcaacatttctttttcacttctcaaggaggacatgattatcccatgatgtttttcttcatgtactaatttctcctcctctttcttcttcaaacctgtccacggaagtgtcagaaatacttctcattttatcctttctcaggaaggccagctagccagctaagaatagcagtcaggaaatggttaagagaataccaagaataaattctgagttgcttctttacaactagaaagctgaatacatttaaggcttgaaaggtcaactcccttcaaagggggcagaggtttgatttcgtccattatgtggtcttcagcacaatgctcatttcattcactggctgcaatggagatttatggagtaaatgttatcacaagctgagacttaatgagaactcagctgtatctcctggatgtagtggaaagcaaccattttggtaataaatagagaacagcatctaatttgtaaattcctttttccgttgctaagtttaatcagatcagtgaaactgaagggaattgttgatgaccaaaaattattttccatgccttaatctggccaggaaacattactcctaatggaaatggcctgttgctctggcgatggaaggggatgacatttgtcattagactaacccaattgttgcatattgataaatatgtttaggccaaaatctatttaaaacccaatagaagctgaggccccatgttgccctggtactggtgttactggttcctagaagtaaaaactctttccagttaaactacagagatctgtagcagtggccatcctaaagatttcttcttgccctcagtgatcatccagagcaaggccagaaggaccatgatggagcccaaattgtggtcataagtgaccttttctgaatggcagagagtgggttcagagaacagaacacaatctctggcagggccttggcttactttagggttaaaacaaattcaagggggcacaaaagggagttgaatgcagctctcttttttccagcggtgcttcagtttttttcgtgatgaatcataaagatcatttccaggatagggaccatgccatgggtaagtgaccgttaacacgcagtaggaactttatgaatactgcatgacgagaatgacagcaatgaggaacacatctgagaagctgatggccccagagggaacacggctaactgtgacatctttagggggtggccctgagaatgctgtatcccttccagtaagagtaccgcctccaggcgacctttagacgcacagcaaggggtcccgaggacattcttctcttggcctgcacttgcttttatattcatgtgcttttgtatacatgcccagtgtccaggcatcctacacactcagagctctaatactgaatattaggaacgacagctactgctcatcaagcacctccttttgcccatattatctttgccctcacttcacattttcagatgagaaaagtgaggttcagatcattggcctgaggccagttcgctaacaggaggtttacccaggcttacacccaggcacgccccatctgactcgaaagccttccctctttctcttttgtcagagaggcaagcacatggtaaccccccagaatcatgagcctggtgataggagaagtggagtggaaagaagccctagaaagggagtatggagacctggttcctagtcccagctctgatactaactggccctgtaacctaaacaaccctttcctctctgggcctcaatttcctcataggtaaaagtaatacccaaaggatctctaattgtctgttaatctttctgcattccaatccccttgaagccccatccagccctgtctttctcttggagtttcacattccagaacaagtctgtggctaagctgaggagaggatgccctcattttgcaaagagacgcttctcccatcttggccaggcagcagaggtcacaagagaggaagtgtccactgcataaggactctggacagcttctctgccagcacgcatccagcagctgactctttcctcggggcccacgctctcctgcccttttcccagagccactaccctgacaatgtctgtctaccttgagagcactgaacagtagaacctcagtgccgggaggtgtcctgaggttctctccttctctcccgtcatccccacctatgtgtgaaactcctctacaacaccttcactacggagtctctccaccctgcttcttacacactctccgtgtaggaacttaccagtcacaaaaaacccttccatctttgtgcaagcctcagctgctggaaggtcttccagctgacacctgcagctattgagtgacagtggaaagacagtgtcctgggtgcagtggcatcctcccgatggtgtggtgaattatcctggcatggttaattactcacactaattgcttttctgtcactgcgctccctcctgcctcctatgtttccatgaggggttgtgcttttgagatcttttcccacctcttctccctttgtcctcccagtgactctgagggaagcgctgagctgctacaccatgttccttctcaaccaaggagccagcactgagcagagaggagctcttgcctcttgcctctggcccaggcaggcatcagggatctctctgtctctctctgtctgcctctctccctcccacccctcgacacagtccttccttcctctctgacatctgtgcttggtcactcccatctgcaagaaggcccgctcccccacagtattattgagatagtaacaggccactgtctcctctctgctttccccaaatcaggcacatcccaacttcaccatccaggtagttgttactcttgtaatgtaagcagcaaaagcgatagagcagcttgaagctgcccagggcccatgttctggctggacaggcccaccgatgcctgtgttcacacagcccacactgcccgacactcccactcctcaccccaagagccttcctgtgttccatccaccaggaccaggactccatccccaaatcagaacctctgtgtcctttccttccttccaggtttcctgggccactgagcctgcagcatgaatcctcctagaatttaagactcagaaggagacaggtcacggagaggtagcagtgtaccccaggcagtcgggcccaggtgagcccaaggtcaggcctcacatttcaagtcgatttcaggatcattaacattcccacttcctgtcatgcccccaggccttttgcttgttgaagacagtggtccctgttctctggatttcaaaaaccatttctctcttctgaaggaagaacaatcagcgtccccaacaagcccagctctcctgagaaattacagaatagttctaagattcgggcaaagagggaggagggatgaagggtgaagaaggcctttgattcagactcagccttgagaggaaggatctggagggagaggctgttcagtggaataatgagagtgacagaggcaggcgttcatccccgtctgttctttttgcacttttggtttggggtcggtttctccttcaatgtgcttggcttagagctgccccagctgctgtgggcatgaaaaccactgctcaccagtctccacatcttggcccttacccaaaataacccaggagggaggaaggagctcatgggtgggtggctggataaatggctccagaataatggatcaaacattgaatgagtgaaggagtacacaccccgtcccttggccccaagatgctcattcatacccctctctgagcgtgaaggagaaacagcaaaagctgaatttggggtgtgtgccccagtgccagccagtctttccagggtgcttccgatgcctccagtggaagtccccagccatgttccctccctggggcattcccatctgccctcccagggaaggctgcttggtgcagcagaggtgtgctctctgggagcttcggtggagaggaaaggacaggggagtcaggatacgagggctggtggagtctgccaggtggggctagggcagcctcgctcttccttgtcccaggagcacatgtcaaaagcgccagggctggggaagcagcagggagcagaggctggagaaggcctgcgtccctgtcccggttctgctctcggcagcctcagttttctcatctccacctgtggctggagacgccttccccagtagtctccccaggttgttgggagcatgaaatgaggtgctgtcatgtgagcgcttgaacagccacactgctggactctcctaatgaacgagcaaagaaccatatgtgtcagcacaccaagctacatggcacaaatagtaaatgcctcagggaaaaggaccattctgggatgccacgtaggtcaaggaggcttcatggagatggtcggagttggagggtaggtaggaaggcttttgtgcatgtgggggagtggtggggatggaattccaagagtggggcagcagggcaaagacccagacacaggcgcacagctcccagcaagcgccctggatgcattaagccctccatcagtggtgtcaaagcaagaggaaccgtgtgtggcatattctggaggcagagagtaggactgagtgcatggatcagagggcgaatgctggaaagggaaggtgtagttagatgggtagagtgaaagcggattgccaagggccctgggagccaggacaagggtcccgtgtgctgagtgatagtgatgtgacatggtgaagtccctgctgagaaagactcctccagaagatgagagaattacgtgtgggcttcaagcccctctctctctgtgccgagagtccccttacaaccaacaacttaactgtttcatccaatcaacccactcctttcttgtagagcttaatttttttttccaaggcaaagaaatcttagagatctcctctcaaccttcacctcccccacccctgcagcaaatgcttatccaggctttgcctggaaacttctactaatgagcaagtcctcatctctccagatagccaggccatttgggaaatgtttcatccattagggcacgatcttcccctgcagttctccttctttagtgcagtgccctctaaaactactctgggcaggtgctgtcttcctcctgtggaaaaaaacttcatatgttggaaggtggtggcgaggtctcttaggttctccttatctaaattaaacctttccattttttcttctactgttctctataagtgacacaacatgacttactggcccttccccatcaaagaactctattattgccccctttagacatgatcctgagcactgaacctctatcctaagggggcctgcctgatacatgggagagggaagccctgcctccctgggtctttgcctgtagcagtgagcctagaaatgcatgaagccgcaggacctctcacaaaagatgtgggcaattaaagcagctagagccgggcacggtggctcacgcctatcatcccagcactttgggaggccgaggcgggcagatcacgaggtcaggagattgagaccatcctggctaacacagtgaaaccccatccctactaaaaatacaaaaaattagccaggcatggtgctgggcgcctatagtcccagctacttgggaggctgaggcaggagaatgacatgaacctggggagtggagcttgcagtgagctgagatcgcaccactgcactccagcctggacaacagagtgaggccctgtctcaaaaaaagaaaaagaaaaagcagccagaggcccggcatggtggctcccgcctgcaatcccagcactttgggagggcgaggtgggatgatcgcttgatcccaggacttcaagaccagtctgggcaatgtagtgaaaccccatctctattaaaaaaaaaaaacaaaataattagctgggtgtggttgtgtgggcctgtaatcctagctacttgggaggctgaggcaggagggtcacttgaacccgggagttttaggctgctgcaagctgtgatcacaccagtgcactccagcctgggtgacagagcaagaccctgtctaaaaaaaaaaaaaaaaaaaaaaaaaaaaacctaaaactaaaacaacacataaagtagccagatggaccaaagactctgtctgccccagggcaagaaagaggaaaacaaactgcaagcatccagcaggcagagttgggagaagaattaaagcaaaggacacgctacatagcagggcaagctgatcgatattctgacagctgcccataaactcattcatgaaattatggggctgaagagacaccatggggttggagttaaaatgactcacttcacataaatgtcatcaatggcggcagcctagaaatttaaggcagcaatttacttgcctgctggaagggaagacacaaatgagacctgtctgaggaagtcttgctccatactcaaggcggctttccctctgtggctgttcacggccttcaaggtagtgctgggcccctgtagatcctccttgcaggaaatctgacctgctcttcagcagcagaaagcagtgaagcaggaaagacggggccccagagaagagagaaaatgagaacaaatcgtgagctctgcatagctttgtgaacggcaaagaacagggtgcaaacgtcaaaactcatccatagtaaaactctgacttccgtacaggagagggagcctggggcctgtgtccatccttgatacttttctgaccaagggtgggctcctggcctctccgtgatgtgcatcaatggtgagtgagaaagggaggcagcactgatggtggaaagaggttcaaaactctaccactatctgcctctgcgactctggacaagctgatgaccctctctggaccttaacattctcacctatacaatgaagggctaggtggggcacagtagctcatgcctgtaatcccaacattttggaaggctgaggtgggaagattgcttgaggccaggagttcgagaccaacctgggcaacatagtgagaccttgtctctacaaaaaatttaaaaattagccatgcatggtggtgcatgcctgtggtcccagctactctcaaggttgtggtgggaggatcacttgagactgggagctggaggctgcggtgagccaagatcatgtcactacactccagcctgggcaacagagtgaaactctgtttcagaaaaaataaaaataaaaaatcaaatgaagggctggcctacaatcctacagaccccttctgactgtgatgatgtcatgattaagatctccatttcacactggggaaaccgagccacagaagagtgaggtcacatagctccaagtggcagagccaggatccaaactcaggcccctggcccccaagcccatgctcctaaccacgctgcctgctgactgcttccttctgcccagaggagccggcagggaggccctgggcagggtcataaaataagtggcttctccccaggaccaccacctgcacccactgccctcctcctccacttagtgatgccagcacatcctcagggctctcttacccttgctctcccatgacagataggaaaaggctttataaattcatcaatagacattctagctaagaggatggacttggcatcagatctacccgggttcaaatcctgaatcttattggcgcttgcttggagtaaacgactgaattttctaagcctcaattttctcatccaaaaaatggggacatctaatgcctccctcatagggttacctcagttaatgtatgtaaaattcatggaagagtagctggcatatagtgagtgattgagagactgagctttgttgttaatatgaagatagaaatggctgatgttgctattgcacactctgggagacaaggccttaaaatcaaggaatggccattaggtgtcatggaaccgggttggaggaggattgggggtgcaaatcatactctatccctttccaatcataccacgtgggtgaccatctggcatgtggcacttagcacttaaaaggacaccactaatgtccttttagtagtgagaactgggtttccaaaggagtgctctagagaaagaccaccacactccatgtctagaagatccctgtcccatccctaatggttgcaggcaagctgtgttttccccttggagtgtctcgccctcctgtgtggtcagatagcctgttttccccatagtccccgagggtctgagcatgtcccaggctgccctgccatctctagtgaaggtggggtgggggtgggagagggagtgtgccaaagttcaagagtttgttgggtgcagctaaacttactgcccctgccccctcccggccccatccacctccccgccaacccggcagcaataaccaaggcagcctgatagactccgtggtgccctaatggtggagagagattttctgcttgggagcacaggatgtttatggcctgctgagatcacagtaaccctggctttcttctttggattatggctgcagatcaagggcaggcatttatgcctcctcccagtttatagcagtgatcataattatggtgatggcagagcgcacttctattgtgcctttttaataaggccactttgtttggcttcttaatatttaatcctgttttatatttactttctgatggcttaaaatcaaccaggctttaattgcttatgcagaggaagccaagctgggcctgggctggcaggaagttgttgagaaggttctggaagctgatggcacctttctctgtgacctttccacccaggcaggctgctgtggcctgggaactgtgtttctttttctcttctctttttctctcatccactctttcctcttattctacaaccttcttttctcttttgccattcctttcctttcttttccttagaagagatcctcagttcaccctccggttcaatttatccatgtaagagaccagagttgtactgtgacctgccaaagctttggagctacttagggcaaggccaaggcgaggactgtctttgttgtttttcctggactcacagtattagagactcctaagactccaaactgggcaaacacatatgaagagttccttcatctatccacttgacaatacatatggccacgtgcttgatctatccaacggtagaaaagtcataaggaataactttccaagttattgttttctgaaagagaaaattaaatcagatgaaacatgccgtgccacagttcctcaattcctgggaagtaacacagcccagttgctcaggtctattctgcggtggggctggagcaaccctgctacaggcccctgcaccaccagctctcagcagcagtccagcctgcaaatgtgcatttcagcgacgtcgcctgatggggctgaaaaaggcctggactcaagacctgtcattctctgccatttactagctctccccttgggcacctaacttcagcctttggggactacactttcttttgtcagtggggataataatatctaccttgcctgtgccgtaggggtatgtcggtcagtgtccccatggaaacagtaggtactcttaaactaggtgacttgaggagggcttcataaagatgcaggcagggtttaaggacttaaggagggcttcataaagatgcaggcagggtttaaggacttaaggagggcttcataaagatgcaggcagggtttaaggacttaaggagggcttcataaagatgcaggcagggtttaaggacttaaggagggcttcataaagatgcaggcagggtttaaggacttaaggagggcttcataaagatgcaggcagggtttaaggacttaaggagggcttcataaagatgcaggcagggtttaaggacttaaggagggcttcataaagatgcaggcagggtttaaggacttaaggagggtttcataaagatgcaggcagggtttaaggacttaaggagggcttcataaagatgcaggcagggtttaaggacttaaggagggcttcataaagatgcaggcagggtttaaggacttaaggagggtttcataaagatgcaggcagggtttaaggacttaaggagggtttcataaagatgcaggcagggtttaaggacttaaggagggcttcataaagatgcaggcagggtttaaggacttaaggagggtttcataaagatgcaggcagggtttaaggacttaaggagggcttcataaagatgcaggcagggtttaaggacttaaggagggtttcataaagatgcaggcagggtttaaggaagccagcaagtacagtaccccagggtagcagctgtgtggatctgttaccggtaaaggctggaggaacaaagtgaggggcagcctcagagtcagagagcagctatgtggagagggccatggggcagacatgtggccttgggcagcaagaagcagccagtctacaccaaccctgtgtgctgcagttggggagcgaacgccccacctctctctcctcgggtccacccacggacgtcctgctagtgctgcccatgggccggcccaagcaggaagcaaggtcagcttcctggagcaccaggcctggggagagggaaggagagtgggtctgaggacagactctcaactgtccggcacctaggagtccccttaaaaccccatgatgatatgaagtgttattctagggagagggtgaaaccaaaacacagatccaggtttttacttaaaattctcaccgactccggagtcacaggagctcagaagaggagactcggtgggcaggagggtggtcctgggagctgccacagatgcgaactgggcctctgagaagggatgaaatttggatagatcaggggtcagctaactttttctagaaagggccagagagtcaatatcaaaggctttgcaggccacacagagcctctaccgaaactcctcccctccactgctgtggtgtgagagcggtgatagacagcacacacagggcacggcagtcccaggaggactgtgctgacaaagacagggcaggctgcagttcgctgacccctggaatacgtgcaggaggtggacaggcactccagggacagggcatgacgtagggccccatgcacgggaaagaccagaggttggtacggagccagcacgttgaaggatggtgaggagggcagcccggtgtggttggagtttctgcaggaagtctcaggacatgagagagaaccgacagtgtcttagtcggccagggctgcccaacagcgtatcacagacccaggagctggaacagcaggagctgattttatcagtctagaggctggaagtctgagatcaaggtgctggcgggcttggttcctcctgagggtcatgagggaaaaggggtcagtccccaggcctctctttggcttgcaggtggctgtcttgtctctgagtcttcacatcgtcttccctctgtacctgtcagtggccacagttgttctgcttataaggatccggtcacactggattcagcccaccctcatgacctcatcttaatctaatgacctctttcaagactctgtctccaaacatggctacgctcagaggtatgcgggggctgggacctcagcatctgaatttccgaggggatataactcaactcacagcagataagatgaagccaaattacagggtgttttagataccagattggagtcaatgaggtaggaaatgaggaatccttttgcttgttaaccgtaagtctgattagtactttgagaaaataaatacaaattatgccgctcatatgcaaaaaatgtaataagatgggcacctggccaagtacatggcaaagtcaattccttagttccatcctggagtgccgggaagcctggacactggatcccagcagactggtgacctggactcagccattggccttgtatgacatcccaccacactggagaagtttgggtggggcaagcagtgctcccgatacccccagccactgcctgggatgtctgggcctgaggcatcaaccctcttcctcccggaggaggcataagattgacagcagctggtgagctctctggccttggataacgagctaccagctaagttccggaatacacactgggcatttttcttagcaaatctcatgagaggccagccactcctgctgacaggcacatcaggacattacaaagctccatccctgggacaaagtcgaagctattttgggtgaccaaaggtttcggaactaggcagattgtttcatctcgccccacatccatccctcattctctcatgtggagctttgctctggtgccactcagtcagtcatgacgcataaaaagctccgagacgggggcctcaggaacaggccggatattctctatgaggatggttctccccatcctcctgccagtctcaggatgggaaggaagggagtcaggatgtggcagggaggaaggaaacgagagtacagcagcgggcaccaaagaggattttgctcattgtttccttcgtggatttattgctgtcaccttagtgccatttttcttttttatcaaaactaaagtggttctgactctcaatcctttgccaaaaccccttctggagtcattttttattcatgaggatgactttggtcatctttggacacatcatgctggcctcatggtggctaaatgagacccaatttctttttaaggagaacatgagtgttcacacgctgacacagcctgcggcagattcactacttggagacttgctttcagcaatacagggaactgtcaagagagccattcgttttacagagagctcacttcctatggggaaagtgaggcttgtgtgctctgacattgcccattttttgttgaccacagctgtaagaagcctggcccgctgatcagtgcagccatactttcaaagcaccacctggtgtttaatggaggattcccaaatttcagcgagtaaaccctcagagggtttgctaacccaaacaccaaggaagggcaatctacacaatggcttagctctagcactcctcccctagcacagctggtgtgcttccagtttcaagagattattccagggagaaaatgactttttataatctccccagtagtcacacaccaaagcaggtcgggggagacactggtgctgtaagacaataactgggcacctctcttgagacatagaaatagtcctactaagtgctgttcaagcaagagtggccaccaagagtacatgtttgtggggttgaggggagaagacattaattaaaggatgtaatcagttgttggcaattcgaccatacaacttgctgtagccattgatgatattactaaaaatgcaatgatgttagccatcttgagctaccagccaagttccagaatacagactggtcattttcttagcaaatctcttgagaggccagccactcctgctggcagatgtttcttgcactttcaaagaaacctcattttcttgtggagtcttctcaccagaagcaagggactggatagcccagagaaacacatttggtccatagcacctggtaagagggaggttagaaaatcggaaaacaagcttcctgtatagctttcttccccagcattctccttcccagatccattcaataaagcatattgtgccttataaaggatgtgctattatgacattgcctgcagatgagcagacaatcaaacttcacttctaaggaagtgaagcaagttggctttagagaaaaggtgccccttagtttccaaccaactcatcatttgaatggccaagggaggggtcaggctttccatctcatccactgaataagtatccagcattcatgattctaaactttcaacaatttggacattcagcttcctagaagttttccttgaggaatcagctttgataccactatgtaatcccttggtaataggaacacaaacaccatttcaccatttgattcctgcaggtgcttatgggataaactatcgcaaattaataggcactaatgtgttcatatattgcttcttccaggtgagacatttttatttcagaaaggaacctttagatatatgcagtgccccaaaagaaagatctgagacttatgtgaaccatccagggagatgatttagttgctcttcagatcattttccatgcaggtgactgccaacttggcccccatgaaagaccagccctggtcaaattcaggttcataaaatgatcatacagttacttctgaaattggacaacataggacacttaggatgtcagagccaaaagctgaataatgcttctgcatggaaggcgtcaatgttctggactctccaccactaagcagggctctcatcccctcagacagccaccacacagatagaaacttggtgactggcagcctacgtccaccccctatatctccagaaagaaagaccattcattatgagagtcccatgttagtgactgtttgagacacctttccctagaagggaaacttgaaccaagtggctcatttcagctcctaactctcagtgctttttgcatgtaggatttctgagaagtgaaaaaaaaaaaaaaacctgccggttatgaagtttctgttccacactttgtaccttaaagatgagtgtgtgagacacagatcttcaggttaaaaataggcatggcccttttctatcactagccagtctccaaaattctccttaccaggcaacatccaaggaagtccattgactataatctgtgttctaggataagaggatgaaatatagaaaaacctaagatttgggttgcccctcccctcatgcctttcctggaagtgatggtgcagcccacaagttcagcagggcacatgtttccttctgtgagtggtgaccaacttcccacctgcatttgctgccactcattaatattaggttggtgcaaaagaaattgtggtttcagactgtgaattttaaatcattataactaggctcaaacacatctttattaatcaaaagaggaaccattacaatcaacacatttttgccaacaagaaataagatttttattcctattatgtaaaactccgtgcttccagattcagcaaactctcggaaagcattttctgcatcctgctggttgtgaaagcattttccctgcaaaaagtcgagatgcttgaagaagtggtagttggttggcgagaggtcgggtgaatatgggcagatgaggcaaaactttgtagcccaattcgttcaacttttgaagcattggttgtgcgacatgcagtcctgcattgttgtggaaaagaattgagccctttctgttggccaatgccagctgcaggcattgcagtttttggtgcatctcattgatttgctgagcatacttcttagatgtaatggtttcgctgggattcagaaagctgtagtgaatcatactaacagaccactaaacagtgatcatgaccttttttggtgtaagtttggctttgggaagtgctttggagcttcttctccatccaacccctgagctggtcgttgctggttgttacacaaaatccacttttcctcacacatcacaatttgattgagaaatagttcattgttgttgagtacaataagagaaggtgacacttcaaaacaatgatttttttttttttttttgctcagctcatgaggcacccacttatcaagctttttcacctttccaataagcttcaaatgcctaacaaccatagaatggttgacattgagttattcggcaaattctcttgtagttgtaagaggatcggctttgatggtggctctcaattggtcatcgtcaacttcccatggcctgccattatgctcctcatcttcttcattatgctcctcatcttctttgcaaaaccttttgaaccaccactgtgccgtacgttcgttagcaattcctgggccaaatgagctgttgatgttgcaagttgtctccactgctttatgacccaaatcgctcgaatttgctctttaacatcctttccatagtctaaaataaacataaaataaatagcaagtaatacatcattaacaaaaaaataaagtgagaaatgcccattaaaatgatgtataacataaccaaatttatttaagaatgtatttcaataccaaatggcaaattccaacaatgcaaaaaacacaattccttttgcaccaacctaacttgtgattgtgccttacttgcctctcattcccagcaccctgcatagtgacctcgcagaggcacagctcatgccagttctttcagatgaaatgggaaaactctatctgaacagttagctaaagcacttgacatccagaactccaagtccatacataacttcccgttccccatgcaatgattagtgtcttcatgctctccagtgcagtggctggtgtcttcacatgcttccatgtagtagctggaatcttcacattctcccgtgcagtggctggtgtcttcacactcttccgtgcagtagctggtatcttcacactcttctgtgcagtggctggtgtcttcctgctctcccatgcagtggcttgtgtcttcacactcttccgtgcagtggctggtgtcttcacactcttccatgcagtggctggtgtcttcacacactcctgtgcagttgctggtgtcttcacactattctgtgcagttgctggtgtcttcatactattctgtgcagtagctggtgtcttcacactattctgtgtagtagctggtgtcttcacactattccctgcagtagctggtgtcttcacactattccgtgcagtagctggtgtcttcacactctcctgtgcagttgctggtgtcttcacactattccctgcagtagctgatgtcttcacactattctgtgcagttgctggtgtcttcacactattccctgcagtagctgatgtcttcacacttttctgtgcagtggctggtgtcttcacactcttccgtgcagtagctggggtcttcacattcttccatgcagtggcaggtgtcttcgtgctctcccgtgcagtggctggtgtcttcacgccctcccatgcagtgggtagtgtcttcacactcttctggagcactctcctcttcagctgtagccgagacccagcagagctcacagaattcttcttccttatttacaaacttcctcaaatgaccacccattgacaggcaatttaacaacttattggcccatttaaactgattaaaagcagacacatatatgttttggatgtgagccctaggcctttgatgggtctttgctgaatagaattgaattattgaactgaacaaggagcaagtaggtcgaccagtgggttgtttttctacctgcaggtgactccatccaggtgcaaatagcaaggaagcccttgaatccactacaggtgaaagttttgcattgtggtcccatgtgagggaggagacaagtcacctggctattgggtagggatgaaggggataccagggctacagttagactttagcagtgaccccgcttgagcctgcaaagggcgacagctccctatggaaacaacagggatgagtggcagccccctccttggaagccttctcaaagtcactcattagatatgccagatagcctctctctcctggagtaattccttctctccagggtccatcatttgttttgtgatgttaattcatgtgagttgggagtttggttctattgtgttatgttttcctgtatgttttgatttattgaattttttttgtttattttctgtgataaaaatggatgttctatgtgaaagctgagttccttgtttctttctcttgcccgtggctgactgcgtgtgctctattgatgtcttgttcctggttcttgacactgaccatcttgtctgtgaaaggaggcactccggcgggcatgcttgatcagaagaaagggaagtttgcttggtttagtcactccacagaaacccatggtaatgttcccctgtgctctgtgtgtgtaaatgcgtgtgggtgcataccagactgaatgggaaggtgtctctcttgatggcttgtgccgcagtagttctgtgtgtgtgcatatatgtgtatgtatatatgttgtgtgtgtgtgtgtgtttgtgaagggatggcaacctgtccccctcaaagccactgccttatcattgcttcatatgtgtaaagtcagtgggtgtgacaaacaggcagagctattcctccaggagctcttcctctgggcagtgctggcctagagtaagcacactgtgaatgcacggttggaaccagcacaggcagtgccttgatttagaaggtgctgtcgttatttccagtgcccaggcctgcccctccgattttgtctgtctttccaggcctagcaccaccacctccacagcactgtactcacacataaggctctgggaacgaagtgtcacaaagtcacagaactttttctacgtggcctagcccttcaaacaaggatgtctggagggtagagagctaaaaactaaaaataaaaaataaaaaaaacctttgggctgagatggctggagatagatgggttggaagactgagagtgcttccattttatggcttccttagtgtggtttgagcaaagcccctggcaagctctgaaggtctgagctaaaaccatccctaagggctggtctcaccagcccctccagacttcagactataaagtgagtgtaatgctgtggaattcagtgcccctgtttggctactcactgccctcctgtggtgctcccagagcctagtaggctttaagaagcttgtctgcctagggtgtagagtacagaggtggtcgagactggggcgctcaagatgaacatgctacaggaggtgtgacacttgtgccctggacccagccctacttgaacacaccatatgaccatgggcatcacatcccttctctggcctcactttcctctcctgcggagtgaggaggacgagttagagccagataatttctaaagcctcacccagccctagagttctataaaatgacatctggattttttttaattcaattttattaaaaaggtcagagaggtctctcatacacaacagtcaaacatacggtaagtcgtggactttctgtttgtatcttccatgttcttgaaatgattctcttctcaccaacctggcttgtcttcatctgaaggaaaggaaaccaggaaaaatccacatctatcaacattatccatgcaaccagtaaaagtgtttcttgggctctggcagcctcgcagggacttgtcaccagaggccactccctcaactaacagcagattctgtgtctgctgagggctgatgactttctcagcatatgaggagttctattctggaggaacagcagaaccaggaccaaggatatgatggccactctaaagaataagggttacaaaactaaggaacgcattgtatcatagtaagagagtgttggaaggtggagaaaaattctttgagttaaacttttatttagaagaaaaaataataataataaaagaaatggcttctttcaagccaccaaactgggttctaagccagaaaactcccattgttctggaaattcagcccacagctgccttgggaggaggctggacaagttgaattaaacggcttatatccaagtcagcctgttgacatgggaatgtcagggtggctgaaaggggaaatcgtatccctacaggctgtcttctgaccacaattaaacataattgtgtggactgcacacttccactcctcactccttatgtctgcagggctagcttgaatcttagtgcatggctctggggatggccattcccctcaagccctctgtctcagttgtgctcctgggtgtaaccaactgccggaaagggaaggcctctgtccacccagcagctcatcaaggtagcaagcacgccctttctacaaacaggctggtccctgttcttggagatggagccccttagagatggtgggtgggatgaagtaaggaaaatgatatattttcatgaaagctcctctttctgtggcaagtggtagttgcaaatggaaagcctctacagcttcttccagtccacagagtggagaggagagattcaatggtcagttttttcaggatgtgtcctatgaggtaaaatgctcttattaccagatgtcctcccatacttccattagtttacagtgttcttggcggcaaaacctgcctggacaaccagcagatgtgtccatcaaggggatctgtgcagatcagccagccagcgtgctcagcctctctttctgccaacccgcactgggtcttgcggtgggcgtgttgcaaactactgctcttctgttcccttgtctccccaccctcaatgcctggctctgcttccctttgactcttgcagtgagcatgcccaccagtgagaccgagtccgtcaacaccgaaaacgtggctggaggtgacatcgagggagaaaactgcggggccaggctggcgtgagtaggcacggcgagcccaggggctggggctttttctggagcatgggtggaaaagctgcatctggaaatcacagtgggctggctcatcactaggaagggcagagattagagccggtggcaagaaacaaacctcaggtgggaaccaagatggggagcagagggccctggggtgagggtggccctggccgggggtgagtcttaaaatcaaggctagtcttcaattcatcacttcttcgggggtgctgactcttaggttttgagcctcttttcatcacatctgagaaatatagagggtgtgtgtgtagggggcggccccaaagtctgtttctttcactccagtccctttcgcccctcttcaaagagacagcgaggttagggccctgagtcctgctggccaccctttccattctgataaatgtgacctgggagagaagcagccaggtgagaagatgttctgggagatgactggcatgtgggtccttacctgaagctctctcatcctgccagtaagggaagcagaagtgcagtggagcctgctgttctgttgccttggggtgtcacgactgtaaactcaccctggcctctggaagaactgcaaacagaggctctgagtcagaccagtcccaggtacaatgcatttctgaattgctccacctggggggcggggcagggcggcatctcccttccctcctcgtctgtggaatgatggagagcctgggcaagcgcagccctttcacaacgctgagctgtggaagagtctaaacacagcaatgccggccttgagcgtggcctgggagcccatgttggggagggagaatgaggctgacggcagagcagctctcacagccgctgtttccagggagcgtggagcttcagtatcactcactctgacactggcaccagggagtctgcactgcagatttctcagcattgtcgggaagcaattattgtcaaaatgttgttaaaatacgatgctaattacatttttaagcagcagtgcaaacctcttcttttggaatcatacaaaacaagcacttgagtttctggaagtaggtcccaaacagcaactctagggaaaggcctataggaaggcttcaaagtctgtcagttctaggcctttctgttgtcttgccaccaagacgaggcttagagagatgatcaaaggccctgcaactctggctgttgggcaggcccaagtcgcataccaggagggactagggagctggcaccaggaagtcacttgatagtacatttcaggagagcatgaggctctgttaggaaggaaacatgatattcccccacggatggagcctggcagtctccagtggatctgtcgtttgctcagagcacatgctctgcagcctggagagctctgcagaaatggtccccgttatccccatgtttagccacattcgtactctgtgcatacagaacgctgagtcacagtgccagaattataatatgccccgaataaaatgtggtctttccccatctccctacctcccaccccgccccagacaatgatgagccaagactgccagcattcctggcgggagaagcagcatgggaactgagattgcgtgtgatggtctgaggggaagtgagtgaccgggatctttaaagctaagggttaaaagtctcatgtaatgagattaggtcacgatgaggactgctgtgtagtaaggaggcctggatgaagacggttcctgttgggggaagggaggaaggaactacggcatgttacttcatggcagcaggggcaggcgggtgcaggtaatgaagaggaaggagccgtcacagtcagggaagaggataatgaggcagaagtgaaatctgaagcaggagcccagttggagtgacctgcgggtgtcatggagaccacgagatacggaggcccgaaactcagccctgaacaagggtggacacacatgtttgaggttgttgggatgaaaactaccaatgaggtgataggacgggttgttcagagtgaagtggaaaacaagaccaagggctgaatcttgggaaatggacacacagaagaataagaccaagcaagcaaaatagacaaaggaatgttaagagaacaggcagcagcgccagcctggaagccgcgggaggaggaatttcaggacagagctgtttatccatgcattcgttcaacagtctgcccagcttggtgctaaggctaggtggtggtgacacacaacagggaggaaattgacaccatcgtgctggagctcacagtctagtgtgggagagacactatgcaaataaataggcaactataggattggggtaagtgttatgaaggaaaagtaagtgtaaagtcgggctaataacaaaggtttctaatttggactggcaggttaggaaaggcttctttgcagaattaaaattccagctgagaacagaaggatgaacatgagttattgagggactggcagacccttaaccgtttgggtctgcatcagaagagtgtgagaagtcactgaagggcattcagaacagagctgagtgggaggttgatttggttagttctgagctcctgaaggatcactgcgacgtcaggaaaagagcagggaggaatgagaagctgcaagagcctgacacaggtgagaggtaatgtggcagcagctcaggctgcagagggaaagaagggctgtgttgtgtgtgtgttctggggtgctacccctcagggttgcagggcactggtcttgggagtcggtctcagtgagggagatggggtggaaatgggccacgacagagtgctcactcaggcagtgaggccatggacagggaggaagatgggagcatgtgaagaggagtagcatgagtgtgggaagcgctggccttcattgtaataaaggcaagggcaaacttcaagacaaggaagaagtcacggagcaggaagaggtgaaacaagctgtaggggaagcaagtgcttataggaaggcattgcttctgaagaggagaagggcgacagcaaagacagtttgaggccctgaacttgctcaggaaggaggaatttctgtgcacctgaaactaattggaaaatgaaagaagaggagtcccagagtctagtgcccaccaacctccagctagccctgggatcttggccaaagcactccgctctgggcctcagcctcgtcctctgggaaaaagaagggtcagactgacatctctgcagaggctggggtggggggcggaaaccacctgcagcggtgcaagatttcatgtgaagaaagcattctacacctggagaaactgcaaaccgtaggtccatgtggtatctaagggtcccttccagttctgtaaagcctacagttctgtaaagaatacagaatcagaaacaggctctgatgaaggggtcagtgacaggagtcactccgaatgagctcagccatctcatctcccaaagcaagggtcaggggtcacaggaacttgaagggcagtatagagactgaaaccagtgagtcgtcgagaggatgctcaaaggttgctgggcagcactgatgccacggtggagactgatatcataaatgtgcagtcagccgtatttttggcagactctgaagcctgagagcactaaaaagagacagcggcgtgtcccagggtggggcttagccatgcaggcatggcagaaggcccaggcggtgtggagtctgtgtggtatcgcgggcaacattgccatgactgtagtcaagcctggtgttaaagggtgagagtgatggggaggatccagtgaggacaaatgttgggtcctctgaaagagcaggagggatcatagaaagggaggctctggccagagtcatggagcatctgagctcagcacccaggagtggaagcaattctatgccgtgcaagggcaggatgtggccctcccaataataagagctgtgggggagaggacgtcctggagttaaggatgctgagtcagacgcattgtcaatgtggatgatgactgcagtgccatctgacttatattaaaggcgaatttgggacaattcagggaaatactattttacacagcaggtagtaaacatatggcactctttcctctaagaagaggggagaggctgaaaatacaaatggctctcaagaagttcaaatatgtctcaaataatgacaaatgcaaactgagtaactaggggaaaaaaggagtttggggtttgtctctaattctgaacctgaaaagcacgaaggaaaatcatggtctcccagaaggtttgtcttggagtcctgggtggagaaagtatctggggttgcatgaacttcagttcctacccagtggatctgttctgatggtctcatgttccttaccagccttctctccctcctcgctcttcttcaagaatccgctcaacctgaggtaggaattgtgcctcattggaacaacaacagtggagacaaccaggaagccttccgagtgtgctgtgcatagagaagccagagcccccagctgttctcagagttctttggagattgtgaagatcggtagcagggaggcattggccacagtgaaccggcctagggtgtggaccagcaccatggcaccaaggcatctgggctcctgatggcaccgaggcacccgggctcctggcttgcgtcctctcactgcaggagcacctttccagcccagaaccctgggccacctcccaggaggcaaagaggtcctatcattaacgccaaggtgtgcaaagggagcagaaagaaccaaggcgttcagacgtcacagagttctcacctcagctccccatgggcatggagttttccctggcctccagacaaaagccgctgagcagtgtcctccccttcgcaaggagtggagcctgcctgacatggaacttagccatttggcggttgcttgtcaaaagtgccagcctttaaaagcggatgaggttttgatccccatgaacctaaaattctgctcacaatcccggaggatagcaacaatagcaacaaaatcagtcttcaagtgtggtgcccaggcttatccatccagacctgtaacaaagcagacaagaaggctctgtccatttcgtgctcagaatgtgcccggatgccacagaaggacctgtagtccacgactgtgcttgaagcaggacctcctttcccagcacccccagcgccaatcctgcttcccagggtcatttcccttggagacgaacactcaggattaggtttccccagaggggagcttttcagagcccacttgcacttgtgacccgcttgcactgtgagcaagacaacgcctcatggcaaagggccggtggtcgtcatcaaggggcaccccagacaggactactgaggtgtttctgaaagaaggcctgggaccaggctaggcttggagtcagagtgacaaggctgaagtccatggtcacccacttgagcttatggttaacagcaaggggagacaaccacccaaaagcagcctgggaagacactgaaggtctggggctcagcatggccccgctggagaagagagcacctaggctccccagcacccaattagcagctgggaaacatttgtttgctggttaaactgtggctgtaaataacaatgctgccctgggctcccagtccccctcccacacgctgttaacctgtgattaagccctccagccctcacaggcagtctttgcgggtgggatgaggttattagctaaccgttcggagcagtaaaggcgcttggctcagactcgcagtgccccagagatgtaattatctcatgcacgatggctttgccacctgtcacatcttctggcttaatttttttaataagaaataacgagaggggctggcgttttcttgctctgcgacacagctagctgtgtgccgcgctgggacgtcgcaggcctgcggcggttgcctcccagactcccttctcctgtttcctccccatgcctctccttgttgctccaccactgtctccatccctttcttcatctctaacttgcgttctgtccttctgcttctccatctgaacattgtcaccacctgcactatccccagcgttcatgcccttctcctagcaccaaagccaagctgacaggtgccttctaatggtctcaactgcttacattctctcactctccctgtctctctctctttggctcagccttctctcctccacacttctcttttacagtctgtccctcctgccctcttctccagcctcctgcctcccctggactcttccctacatgacctagggagcctcaggacttccttgaaggttctgcctttccatggaacctcctccctgttccatgacccttccaggcagccaccctcacacccaccctgagcttctgcccagaggtccccaggtcttcagggctgcgtgtgaccgtcagcatcctgggtttctcctcggagtctggggctggcgccttaggcctcctctgcagctcttgggtgggggctgttgtggcccctccatttctggctggctccttttgctggtcttcccttcataaccctactctagctgggctctggcagacagctgtgaggtctgtgccgacctgttcttgcctgtgatttttctgctgttggggtcctcttgtcatcaggagaggccttttctttctctgcagcttgtctcaagatacagctcttcctaacctgacctcatagaagtttctaggcagaccctgaggacctgctactctccctctgcagcaaggattgtctatacttagaagatgctagccaggccagacctcagtctccacattcaaatacataaatagggttctttctctcccaagatgttctagttcacaccatgcctccttccagcacccacacgaaattacctggggaacatcaaatttccctgggactgttgaccgtcttttaaatgcacgtgtgtgtccatcctttggtaacatttcctttttctttttcagccaccggatctccaagtcaaagttcaggtgagtgagactcacgctgctcttccttccttctgccaccagctctgtcttcagccaccctgttgggtggcccaaggtaatacctacaagttgccagtagtgtaagggctgttcttctaagggggtaactactttctgtatggccatcaagaaaaagcttatggctcagatcagacaaataatccagcggttgatatttgttgaatgatcttggactgtccatctttttggcagcacagtccctaggaagttgtcagaccaaatgtgttttcctcccttctaagatgaagtccagttaaaagaaacataaagtgagcccttgtgactgtcatgacctacttcatgtttatagaacatggtgagatgtaacctttgatgatgatggaaagcacgtaggattatgacacccgtctgtgtcactgctcttgacaatgacagaacctacaaaaggatccagggtcctcagcccccatctgcctcccagcctcacttcctgcacttccatgaaaataacctttgttccccctacaaggaacttcttgcagttatccaaatgttccctgtcctggtgcacactgaggcccctgcatggagccaatccttcacttaaatcactatgcccccatgccttcatctggagaactcacacttctgttcagaccctcagatgtgactgcttccgtgttactgctttctctgccatttcactgggcctggaaaataccttctgcaaactccagggagagttactcagctcccccttccctggtgctttgctgatgcctctgtcacagcactcagcacatgacactcggattactggctcacagtcccctgcttccaaaggctctgcctgcatgcctccaggggttatttccagagcacccagctcagtgcctgtccagtggtgaacgtccatacatgtgtgttgaatgaatgagtggacagatgtgtgcagggagaatgtgaattcactcccacaaagcttgtatgtgccaaaaaatattggttatttttcataattgagctaatcttgtttccctagccctatctcctacatggcaggagcatagagaaatttttatccagctgagtaaatgtagcccagtgctgtattttaaacagtcccttaaggtaaagtgatttgtctctcagattgcctctctcccagctcctctcttggacggagctggacacatggcggagagggactttgagatcccaggaagcagggaatgatgagggctggtcctagaagccacgcgagccctctggatgcttgctcatctctgctgcatggggctaggctgaactgctgtctgaactggtacctgctgaggtccatctggttagggcatccactgctggagtccatgcccttagggcatccactgctggagtccatgccctctacttgcctccggccttgaaatctccacctctgctctctgacccttgagttctgttggcccactgactttagcacctctatacctcagctgaggacatggacacttccaggtccctcacactccgtgaaggagctagaggagacagcagccctatgacaggctcattggcctaccggtgtcccatcacaacctctgtaacagccaggataagcttcaagccaagggctgaccttctcccagggtctgccgaggcactccaccagccccagtgttgctgggcttccccgtggccatctgggtgtttctaaagcaactccccaccaacctcttgggctgtggtgaccaagggctaaaaattaagtggggaccctggtgtctgacttttgctccacttctgataccttctttctctcccgtttcactaggactggaaaatacaggcttttttcccaatccttgtttctctcaaaccaagacctcatctacataaaacatctagggtcaggcccatccactctagctcttattacagagcaagagctccagaaatattaaaaaaaaaaaatttctctctctcagtaatgcttggctgttactgcttaatctccagcatctggagaagtggctggtacataacaagaacctaataaatatttgctgggtgagtgagtaattaataaatgaatgatcttgccccagtaagacaatagacttgacacagattcaaacaaaatatctaatttgacagtcaaagctgaaaaagcatgttgtgctttaacagttccaaagcccccacacaataagagtaaagggattaaaaatacacttgaaaatatttccaaaatatcattctcagttcatgcaagtgagtaaatcataaattaataaatgaatgaatgaatgaatgaatatgatctggaggatggaagggaaaattacatacttgtgtctcgagttagagattgcctggaacactctgggaacattattttcatccagtgatctatggtgcaaactgtgcttttcaacaagagggaaagagcagtggtgcctgtaaacctctggagtctccctcggccctgaggctttgctatgtgctggccattcagccctgatcatctgcctctgggaaggccttctccttctgcagccacccctcaatacaccgcagtaatgcggacggcagattttgttctcctaaaggcttacagctagtagattggcactatcattgaaactcatttccagatgaggatcctgaggctttgagaggcccaggtcacagggctctagtatggctgagtcagagctcatacccaggggctctgctgccaatcactgtgccatccttgtgatgaggttctgcccgggaatagtaaaccctgttcctgtatagctagtgtgtccgcagagtgtgtaactctagagccatgctattcaacagaaatatagtgcaagccacatatgtacttttaaaaatgttctagtaggcaggttaaaaaataaaaagaaacaggaaatttctttgatttaaaccagtatctctaaaacattactatttcaatatgtaattcacataaaaattattaatgacatattttgcattcatccttttgtgccaagtctttgaaattcagtgtgtgtttttcccttactgcccatctcagtctggactgaccatgtttcccatgcacggtagctgcatgttgctagcggctgccacgcaaggccacgtggccctggaggtttcacacatgagcaggtatcacacagcagccgtctaatctagattcagcagttcactgatggtgtctgcttagggaatatcaaaggttacaaatagattgaaaatgccaccaacgttttcaaagtattcctgatcattttctcaagttaggtgaaacagtttaacaattacagataatggaatttgagtctcaaactggccttttcctttgcaaaacagaatgatccaaagtcacggtttctttaaagaactgtaagaatggagtctctagggaaaatgtggccggttagtggattacagccatagtggaggattcccttggtaatccaggttttcacttagaggaattagttaaaataagagatttgtgacatttggagctcactgttcagaataaatgtaaacagttatgaaacaaatgattcaggaagtcttttgtaacctgaagggattgattacacaagttggagtttctggatctcaactttacggagttctgaagtgaacctcacggggttctgaaattgggaggactagcttgcccagtcttcagtgaaatgtgcttccaatgttctcttcacttctgccataccatcagcaacaaggcacaaatccaaatttgccccaatctctaatagtcctttgtaaagttacttatttacaagagaattaaacttaatgattttctgtggtgtttgttgttggttctggtaaaaaaaaaaaaaaaaaaaaaaagtggaaacttactctagccactagaaggagcctgcagggcccatcattttgatgttgtcgacgattccagatgcctgtgcaccattgcatgtcaagcaaactattttaggagcactgtccgctcctcacctccaccctcagccctggttcacaagagctccgggaatcttcaagccttgtcttccagagggaggtagtacatttgcgtagagttcgtctctgctgctcaaccgtgccatcagccaggggttcccgtgcaggatggactgtgctgagtcccatgggtctgtaaccaagtgtaagacacaacccgattccttcgtgggtcttgtgagctccgcggagaggcaggaaccatacaaatgaaacgtaactgacagtacaaggaaatgggaactcatttcctctggggacccttctcgcctaaggtgtcctttcgtgtgctccctggtggacccgcccagcactcaggccctgctgtgactgctcacttagtggtctgtgtctccgtgtagcttttacgcagaggaggcctgtgagcgctgtgctagctactgagtatctggtgcctagcccgtggtcagtgtttagtaactatttcttggatgtgtaactaaaatgagtaatgcagacagtaagcgctgaagagtgccaaggctgagaagactagaagcatgcatcgtggagaagctgggactcagtgtgagccccacaggaggggcaggacagacaggatgaagcaacggtggagtttccggtagctgggaggacttgccttgcagctggacaggcaagaggaaggcccagtgtagggagaagggcaggtggagctggggctgcgagagcagaagtttagaagcagtgatcccgaagtttagagacatagatgagacccattcgtatccatccctctctcctgtgtctacatatggaaggttctatttctagagaaaatgacttccagttagtgtgaagggaatatgaatagcaggcaaatttctcctccctattttatcatttaatttctgtatcctccatgcatatgtaaacataaataaatttacacattctaataaaccattacatttattatacagtaggaagtgttgccaggaaaccagttgtcaagcaaagctatattttgaagagtgggaggtgcataattatctttaaatactttctctggatagtaattaccccacccccaccccagcccaaatccatgtgactctcccaaatgggtctgctcaggagcaccccagttgaaagggacaccgtcctgtccactccggccactcctcaggggtctgtgcagagcagctccagacccatgggaccagcctgaccacacagcacccatatccactactcccaagcatgaggaaaaaggggcataatcaagctctcatattaaacccactccaagacagctctacataccgcaaagaaagcaaccttgattgccttggactctgaataacaattatcagtgatttctggaacttgagactgtatctatttaaaacatgttctttgcaaacttcactgtcagctctttaagatcagatatgagtttgtcctgaaaattcattttttaggggaataaactacttgccaaatttctgtacagtattaataatcacaatcacaggaaaaaagcagaggcatgccctgcaagataagactgtttagtatcaagatctggcaaacttcagaggtcgcctctcaagaggaccatctgggactcattgtctcatttctttgtccctctgtccaccctccaccatcctccctcggatccagggcagtatgtctgggggtgcaagaatcccaaagtgcatttagaaatcataacgttttaaattgttaatgtttatgggcactaatgggtgtatatatttatgaggtgcatgtgatgttttgatccaggtgtacaatgtgcaaaaatcaaaccagggttatcagggtgttcctcacatcaagcacttatcatttctttgtattacgaacattccaattccagtcttttagtttattttaaaatatgcaataaattatcatgactgtagtcaccatccttctctcctatgttgtatgatcaaatattacatcatatttattctatttaactatattttttcacctatttaccatctccactaccctttccagcttctggtaaccatcattctactctctgtatccatgagttcaattgctttaatttttagctcccacatatgagtgagaatatgtacaatttgtctttctgtgcctggcttatttcacttaatataatggcctccagttccatccatgttgttgcaaatgacagaatttcattcttttttatagctgaacaatattccattgtgtacatgtaccacattttcttcattcatttgctgatgggcgcttaggttgattctgtatcttggctattgtaaatagtgccgcagtgaacataggagaacataggagtgcagatatctcttcagtatacagattggaaaccatgttttccacctggtggcctgcttccctgtgtagtggattttcccccaagtggtaggccagtgtcgcatgttaaggtgtggccctcactggagatggccttcaagctagagcagaacactgcctggattaatcctttttcccctccctgctcctcaagccaaaaactaagttctccctgcagtcctgaagaaagagtacccttctttgattactcttcactctcctaacctcatcttagatttagcaaagtcttggtaacaggattttctgcagatcatagatagaaaaatgacagagtagaaaggtggatgaagtcaggctactccaagaggcaattttgggggtatgtgcagggatccgtaacagcccaggttggcatcttggagtttgctgatgtttggaggggcttctgccctggaagtagaggaccaaggctgagggcagtgcacacagcacggagctgtccctgccccctggggcacacccacatgtggtgctgctacatgcccgggggctaggaaggaataggccattcacagaccagtgagttcacacagatggggcttgctgttccaccaccagcataacttgacccaggaggtgacgctgaggcttgatggtcatctctggcaggaagattggagaaacggactcatgccatggactgtgatttagaatggaggacctcatttcagcttccttgcgctgaagtggagggccggttttcacatccagacttagtatgccacacacagacacacacacaccggaaacaaagttttatgtaaaaatatttttgcttactgcttactttaaaaagcagtttccttacgatatgatacgcactgtgatattttccactctattcctttattcagtgccaggcatgacctactcaatagatttcatgacccactaatgggctgcagtgtgaggtttgaaacctctgcccagaggcagattctgcatgcttatttagaggaatgtctgtctagacgagagagattcatagaaaggagatcattttatggaaaaatacagatattcatggactttatcaccaggattctactttgtttctcctcctgccttcattacccaggcaggagctgtatcttcaatgcctcgtgggtctgcgtacaagccctacaggtgccccaaagccatgtgcagagctaagcaccccatttttctcataactgacccctctgcctggagctctactcccgctcctctggccctcctctgtgctgccctcccaaatcgccccagctaaaaatgttggcagtcccttccatacctgtctttcttattctgcacatccgctcatctcaagggactattgattctgcctctaaaattgctgccagctctgtgtcatcttttccattaatatagctattgccttcatcatctctaacctggagaacaggaagagaattcctcatactctccctggtctagaaggtgacagaggggctgtttttgtggggtgttccaatccaacctgatcatgtcctttccccctccccaagccctcagcatggcccctgcagtctcctcctcagcacctctccagctatggttcttctctccttgcacagtgcagccatttattaaccatgtcgtctactgaattcaaccaaacagagctgtatattttctctgtatcaggaaaatgaaaacgcctccaccatagaatcttaaaatgtgtttctttaggatcatcttagccactggttctcaaccatcattacacattagaaccacctggggagccttaaaaatacccaaccccggccgggcgcggtggctcacgcctgtaatcccagcactttgggaggccgaggcgggtggatcatgaggtcaggagatcgagaccatcctggctaacaaggtgaaacccgtctctactaaaaatacaaaaaattagccgggcgcggtggcgggcgcctgtagtcccagctactcgggaggctgaggcaggagaatggcgtgaacccgggaagcggagcttgcagtgagccgagattgcgccactgcagtccgcagtccggcctgggcgacagagcgagactccgtctcagaaaaaaaaaaaaaaaaaaaaatacccaacccctagagaatcagacttaattggtttggtgttggggcttgcggaccagtggggttttggggagggttccctaggtaattctgtgtgtagccaggtttgagaatcactgacaaaggctcctaaaccaagatacggggaagagtccatggagcatggatgagctttgaggggtctgtgtgctgtgtgggctctcaagtaaaggtgtgtgtgtgggcatgtgcccatttttctgaaaggcagatctaaacattcatcagattctggaaagattctataacccagaaaaacaaagagcctgtgctccagatgaaccccttctaccatatggatgtggcacacacagtcagggccaagaggctgggcagaaaactacggatggctctgcctgctgtgatattggtcgagtactcaacctccccagccctgagttttctcctccacaaaaatcaggataatgcgtgctttgcagagttactgaaagaattggagagaaggcatgagaagtgcctgatgtggtactgggcccctcctccactgttactaataatgctcttattgcttacaacactatttctaagaatgctgtttcacaaaaattaaaaaaacttccatttattgagcatcttcaacttcaaagcagccagatgcattataaggtatttgatccatccccacaataaccccatgaggtcggccctcttcccgggagaactgaagcttggaggagttcaggggcatccccaaggcggcagggcctggttagctggatgagaagctgggctccttgccaccagattgggctgctctagcaaggccagatcagtgaggggcgagaagagccatggtgctgcatcttgggttggaggaaacctgaattcacagccaaccccacccttctctccctgtcccctttccagccgctactggcgccggtggaatcggttctgcagaaggaagtgccgcgccgcagtcaagtctaatgtcttctactggctggtgattttcctggtgttcctcaacacgctcaccattgcctctgagcactacaaccagcccaactggctcacagaagtccaaggtgagcggcggccccagctctgctctggtttcctcctggtaactcagccccaaggcccaggggagggcataaccacaggcagaaggtggaggggaaagcagccaatggtcggggctcttggcaggtgctgtgctggagacaccaagggcctggcagttccaaagccccacaataaaatgcgctaccttgttaaaaacagacacggctctcctgactgggcccacaccatcagcctgccccaaagtcactgttggacccaggtgatgaggaaaggggctgcagcttgtttgcctatctcagactcctggctgccaactccccagcatggattttaaatacctgggggccttcctacagccctgaggtggccttaaccagaacacatgaggatggaatgagcaaaaaggcagagaagagaatagggcctgagcacaaggaaccgtcttcaatgggtcgttcattctcattatccttccttgggcccctagacgagggtcccactagccaggcctcagcatcattgctgggcagtcaagaagacctggccccatcctccacagctgctttccagagtcctgggaggcagggggtctagtggcggagaagtcagactcagacagtgcggctccaactgttggctgtttggcctgcacaggctactcacctctttgaacctcctttctcatctctgaaaatgggcatgacgatggtggtaccatccccacaggcctgctatgaggaggagagattgtgtgtgctgagcctatggtgcatgggagatgctcagtaaatgtctgttatgattgtgacgagagagccctttcccattggcttggccccaacttctgttctggccgaggtggatgggagaggtgtcatgggggatcttttttccaatggagataattactgtatttcctttccctgcctccctctctgcctcctctggccctgctcggatctcatccctctcctgggcctgccagacacggcaaacaaggccctgctggccctgttcacggcagagatgctcctgaagatgtacagcctgggcctgcaggcctacttcgtgtccctcttcaaccgctttgactgcttcgtcgtgtgtggcggcatcctggagaccatcctggtggagaccaagatcatgtccccactgggcatctccgtgctcagatgcgtccggctgctgaggattttcaagatcacgaggtactgggctccccctctcactttgaagaggggactcaggaagaagttcttccagagggcaagggaggtggcaaggcctgggtgggaggggggctgttcttcctcaaagggtgtctctgaagttcacatgcaatgggggtagtttgtgttcatttagatggcacatcatttggaaattcctctggctgctaataccagagactcaactcagtaatgtaagcaagctagggacttattcagccatggaaaaaaagtccagaggcagctagctgaggtgccttcaagaagagggtcagggactcaatctcttctcctgtgcttcaccagccttggtgctgattcttctccagggtcataagatgacttctggagactgagccatcacattcaaattggaggtgggaagaagagaaaggagcaaaagggccgaccaccccggccaagtcagcttctccactcccagaagtcactcccagacacacccattaggactgctgctgtcaaaaaaaactgaaaatcataagggttggcaatgacatggagaaattggaacccttgtgcactatgggtgggagtgtaaaatggtgcagccaccgtgggaaatggtatggcagttcctaaaaacgttaatgataggattaccctctcatccatcaattccacttctgggtatatgcccaaaataattgaaagtaggatctcaaagagatatttgcacacccaagtgccttagacagatgaatgtatttttaaaatgtggtctacacatacagttcaatattattcagtcttaaaaaggaaggaaatcctgacacatgctacaaagtagatgaaacttaaggacattatgctaagtgaaataagccagtcacagaaagacaaatactgtatgattccatttatatgtggctcttagagtagtcagattcacagagacagaaagcagaatggtgggcgcccagggctggagggagggggcagtggggagttagtgtttaatgggttctggagatggaggatggtggtggtttcacaacagcgtgaatgtatttagcaccactgaattctacagtttaaaaaaaaaggttaagatggtaaattttatgttatgtgtattttaacacagtgaaacaaattggaagaaatcttccagaagtctcagcaagggcttctgttcttgagcacctgagctgttagggaggctgagaaatgcagtattctagcaggacaagttctgctgaaaatgcgttcaagatctagccactgtaaagggctgtggacactgcactgcagatggtgttcaccctctgtccacatggccacccctccatatgtcagtccggcacctacccaaagcaggccatctccctcactgtctaggccaagcagtgactctcaagacaaggacagggctgaggggcaccatgctctaggacaatgattttcacctgacttatgaccactgggagtggtggaatccatttattggatcacaaccatcattttaaaacatactgaaatataattcatatcccatatatttaccccttacaatgtgtaacttaattgtttttttatattcatggttatgcaaccatcaccatgttctagttgtagaacattttcatcaccccagaaagaaactccatacccattccacatttcccccatcttccctcccagcaaccaaattcactttatgtctctatagagttgcctattttggaccattcatgtgagtgaaatcttataatatgtgtttttgtgatggcctctttgacttagaataatgttttcaagggccatccatgttgtagcatagatcagtactttgtttccttttatggtgaataatattccattgtagggatatactacattttgtgtattcatgtatcagtgatggacatttggttgttactatcttttggctcctatgaataatgctgctatgaacattcatgttcaagtcttcctatagatgtaggcttttgtttttcttggataggtacctcggagtggaatttctagattatttggtaacaatatgtttaagattttgaggaactgtcaaactgttttccaaagagactaaagcatcttacatttccaccagcaatgtataagggttccaatttcttcacattctcacaagcatcgtttttaaagaaagaatgaaatagaataggaaaacatcagagggtctcacatgaacgtaaacattgtttcataaaaagctgagatgcagacctgacttgcagtagaatacatatttcttaatgtgcgttatgatcaaccttagaagacatatgggaaacacctggaaggaattttcaacctgtgcccctctaaggtacaagtcccctgtccttaaaaatctgctttgggggctcccaaaatctctgctttggggaatctttgataacaggagcactaaaaccatccgttggattgtgatgggtaaaaagggatggaggttggtgtcttcagttcaggatctggagctgatggcatcttgctcagagcgtgtttctgagtgtccctaggtgttgctcttctcgtcacaattctcttggcaaccacccagagcatggtcacatggtgttgtggatggtccggggaggtagacatttaaagtgtttcatttagtgcacagaaaggactcaatatgcagaagcttttattattcatctaatattatgactgctattattagaaggaagaaagagaagagagctaatagtgacctacatattcacatactcttgttcttacttatttacccactacgtatatactgtgtattgagctcagagagatggaaaaaatcgaaaaataaggcgtatggcgtgaactaaatccaggagaaatgtatagtctggttggggagatggagtttgtgcacatgaagagattaaaggaaaatctatgacagaatataatgagctggcaaagtgtggtgggcgtgggaattacctgctgtgagaaattgggagcaggagatagctcctggagaaggttgaatctcagatgagggacttaacagacacccacgattaaaatccagaagtttaatgctcctaagcaacagccttctttccctctctgaccccatcgaaagagagctcttcctaagtgtcctgaatatgttggcattacagaaagtccttggtttacagtgaaagtggtagaaatccttatatcagcaatgattaccatgcaccagtgcttactctgtgccagatagggtgagcagaggcctacgaatgttagcttgagtgatcctcccaagtacctacatgaggatgaggataggctactactattattattcccactttgcagatgagagactgaggcttagagagttgtcagttgcccaaggtcacaaaactgctcagaggtaacactgggattaaaaggcaaggcaggtctgtggtctgacttgaggtgctatactcctaaccactgccatgcactgcagagctgagagctgacctgtcttcttgtctaggtccctgagacaggacttaaaagatctttatgccctggttcttgttagataattgccgattctacttgctcctcctggggtctggtaaaactatttttaacttgcagttttcaatgcctcttaaataattctcaaaagtccctgttttgggcttttatgtatatatttctatagaaaagaaatcttgctgctatatattgttatgacatcttgaaaagatttaacattcattctatttttaatcaccaatttatttctaatctgaagatattgccaagaaaccatttttaaaaatctatcttaatcagagagcttcctgtagtccctccacaagaaggagtagtagtattttcagatctctatgaagtctataaacagaaaaaatcattgtctaattgaaagtgactgtggcaaaggccgtcatcttcctattttcaagtctccaaagcctctgggggctttcggaaagcaacaaagagactaattaggttgggggatcccataagtccgtctccagcgccagccttgggactgggtgacagtgaccaagaaaaatgcctaaaatatgggttgggagtggacattgtggtcccttcagctgaaccttgaaatgggtcatctgtgcatggtcctgccatcagacaagtgcatgccttcttcttttaaaatatcttggaaagtactttgcaatgtcttgctgctactcatatgtagaagaaatttcttctctttttttttttttttttttttacaatgtagtctgaaccagtaattgcaattcttaaacttagctgaacccatgaaggagttcattaaggagctcatctctagagattttggccagcaactcctggagagttccatgctagtggtccaatgaccgacctcacttgaagaaccactggcctaatttcctactgctgctcttggtctgctttcttctcctaaaatactgcccttcatatgcaatcggaaaacttgattattattcctcctcctcctcctcctcctcttcctcctccttctcttcttcctcctcctcctcctctcctcctccttctcctcttcctcctcttcctcctccttcttctcttcctcctcctcctgttcctcctcctcttcctcttcctgctccttctcctcttcctcctcctcctcttcctccttctcctcttcctcctcctcctcctctcctgctccttctcctcttcctccttcttcttctcttcctccttctcccctcctccttctcctctcctcctccttctcctctcctcctccttctcctctcctcctccttctcctcttcctcctcctcctctcctcctccttctcctcttcctcctcctctcttcctcctcttcctcctccttcttctcttcctccttctcctcttcctcctcctcttcctcctcctcttcctcttcctgctccttctcctcttcctcctccttcttctgttcctccttctcctctcctcctcctcctcctctcctccttctcctctcctcctcctcccctcctccttctcttcctcctcctcttcctcctcctcctccttctcttcttcttctcctctcctcctcttcttcctccttctcctcctcctcttcctcctcctcctctcctcctccttctcctcttcctcttcctcctctcctcctcctcctcctgtcctcttccttctcctccttcttctcctcctcctcctccttcttcttccttttcttcttcttcttctcttccctcttcttttttcaagacaggatctcactctgtcacctaggctggagtgtggtagcataatcatagctcactgtagcctcaaactcctgggctcaagtgatactccagcctcgtctcagcctcccaagtaactgggactataagtgccatgtctggctaatatttttattttttgtagagatggggtctcactatattgcccaggcaggtctggaactcctggacttaagagatcctctcacttggctgaccaccttgcccagccaaaaaacttgattcttacatctccactgtcttctccatactgtagtctctaattctgtcaagatggtacttttgatagtttttgactgagaaaacacatcaaggtaagaactactatgaattcagcaaagcttttaaatttaaattcctacacatctgtgtatgtttgaaaagtggtaatatgaatgcaagacaaggctgtttattcagagtagtataatgcttggtgtacacatggattcatggatccctttctagaattctagaattccaggctgctcttccctcacccaggacccatggtccaagggtcgggaacagggatctaaatcaatggttcttcaccctgaggtcatgacacagtggtacatccagagcagctggatagtgatagcaaataatttattactgagagctgaaattccaaagtttgtgaatagtttctttaaaaaataaaacaaattaatattgtccttgtaacataatagcatcactctgtcacttgcattacaaaatgcttctatgaatgggtgagatccgggtggacttacaactcatccatgatgcctgaagggagcagatgtctttgatatatcattatgaggaaaatgaattatttacatactgacattttttgtgttttgtcaaaatctgagaacaccttagggagtatgctacatgtatgaagatcattcatcctcttgttgagaacaccttagggaatgtgctacatgtatgaatatcattcatcctattgtttcaagacaaaaaaaaggccaggaagcctgtactagactgtaagaaaattactttatagaaaagattgaggaagacaagattcctgctcattgaaaacagtggggcacacgcatggccggaatctttgtcatctttgagtaaatgccccagtacggtgggccttccagcctcatgatggattgggttcttccacctgtggctcttggtgctgcccagattcaatatccagtttttctactctttgtcagcccagtctgacatattctgtggggtgggagaagggctccagacagattcaatccggacgtgataccagtttactgattgcatctcatttttgacacacttggttttcaagtgcagtgaggcccctctagcacttgctgtttcccctctcacaccttcaatccctctttatttctcctgctgctcctcccctgcagctcccttcccaggccttgaaatgggagctggggctgattcagcacagacagattggctcataaatcttggccacatatgggccccacagagctccaggtgagagccgttagcacatctcccaggctcgaaatgtctccatgtccctaccagcatctggccttgagcagcagatccagccccacaccttcccagctcttccatcaccttctagcccccactcttctcaggccccctggagcctctgagctcattgagggccattattaaggaagtctgtttggcagatgcccagttccctggcaggggtctgtggcaaaggtagctcagactccagagcctgcaatgtggctgtcaacacaatgggtggttctcctttggtatgggaatggactggtgtcacctactaggagaaagattaaaaagatgcaggtgaggatgactccctagccctgacacaactgtggttggaggggccaactaggtgacactgagtagccccgtggcccagaagctcagagaagcatgctgctaaggccatccccaggtccaggccagaccaccttgcccgcttgaccaggttacactccccatgcaggttccgttcttaatgtgaccgagacatctgctgcaaacagagaagacaagacctttgaacttgttaactaagtcagcccttgcctcaaaagtgaaaccacaaaatggtcttcccagcctgctagaatggacgggagcaggggcaggtaccagtagaaactgaaccggtagttgaggccttggggcccaggttgtcccagaccaaaatactctagaattctgcttgactcctcctggcccagcccagcatatacggttctgcctctgggcatcctaatccctcccagctctattgtgtcttaaggggctggggctcaatttgacggaagctctgctctgaggacaccccctcctgtgctcacttgctggatggattctacctgcttccccaggtggcctcagccaattctcactcctcttcactccattgcctcccatgaagccccagccacacagattcaccacaggggactgctttataactgctcttttaacaatagatcacttgccaccgaaactaagaatttttttttagccttcaggatgagaacattttgggcaggtatcaaactcagttatgaccttctctggaacacagagagaatagggtggaacatttgcagagcatccgaaagtggtgggtactgttattttgaagatctcttatttatggcaagctcaatgctctgctctatacctagaataaaggtaaaggacctggccctgagctctttgaagcaaaaggttcatgagatgaaagttccagttcaaggaaggctcgggtcactttatattatagaagaggaggaagaattccacagagccccaaacccagagacagacctagagacggggaaacaaatggagataaaaggatttctgaacagatggtggtaacttaaatcaggagaggcagagggaaaaggtaacagaagtgacatggtggtcggcaagtgagagagcttaaagggaggctgggagtaggaaggtagagggaaggagagaatttaggtggcagagaacttgatgtgatgaaaagccctcagatgtgctgtacttttaaggataaaacagggagccgagtgggtcagatgggggatggggtgagcagggacgcacagtttggagagaatgattccagcagctggagaatgggaaaggaaagttgatgccaatgatggcgacgcaggcagagtgtctggggggtgatctagagctggacaccggcacccgggtgctgtagagcccacagtactgaatgtgagcttgtgggcatgtgtgtgcactgctctgatgagagagtgcttcatttttatgcttttccatgaggcctgtgaccaaaagacatgaagtgctttgctctgctgctgctcgcttctctccaaagctcttgcctttttggtgtgtgagcgtgtgtatctcatatttttgaccaatgaggaaaaaagcttcagctgattgtgaatgtgccattaacccctctagtttaccaacagtgaatcttcctaaaaaagatggtgattctaggataggaggccatcatccaatcttcaggccatagctgtgcgagccatcagaccacattaagaggagggagtgtgaggacctgcaggaccgccagctgtttatttaagtggtttcacgtcaccctacccacctcaaaggctgccacctggacacctccaaatcccatccatatcagtgatagtgagcccccaccctcaacctgctaccagccaaggcctgccagtctccagaattcagcccatctcctctgaaccctatcagcattctttgccacatcatcatttcagcaattcctttgtctcatcttctagatgagcatataaaacatccctgataatttgcacgttaggaatggaagccttctgctcagcaagctgagcacccctcgtgatgccaggccctgggcagcagcctgccccctttatcctgctgcaaaggaaaggaaaggacaggtggcaggcctgcctcgggcccaaccccatctttctctctgttgaatgggaagcaacagtaggctgaagacaaacagcacaaacaaccatatctctgtctgtctgtctgtctgagccatgttttaactgtgttactggtccccaggacagtgtctttcccctcaggtgtttttcatgtagacagtaggctggtgccaattcatcttttaaacagaggctgacctgtgccctcaaaactgggaccagtgaatttgagaatgtgagttcttccccaaaggtgacacatgttcacagtgatctggaaatcctactcccaaggtttgctcaagccacagaaaccgttttctgtaggacatattgatacatattagtttgatgcatggtctggcaatggaacagtcaggaatctcagaaaatccctccccatggatgtagggaagctatgggaataggaaggctatgggagcaggggcaggcagccacttctcactgtttggcaaagtgtgttcaacttaagtgcacacgcacacaaacacacatgcacagaagcacccatgcacctccatggccccttgcctttccctccaggaagtaccaatgtgtcatatgaatagtaaggttcattcattcactgaacaaaatgtttgctcatcacctgctttgggccaggcactgttctaagctccaaggatataaatgtaacagatgggttccttctcccatggcctcacattctggcgagggcaagcagacaataagcaaagaagtaattattcttttttttttttttttgagacggagtctcgctctgtcgcccaggctggagtgcagtggcgcgatctcggctcactgcaagctccgcctcccgggttcacgccattctcctgcctcagcctcccgagtagctgggactacaggcgcccgctaccacacccggctaattttttgtatttttagtagagacggggtttcaccgtgttagccaggatggtctcgatctcctgacctcgtgatccgcccgcctcggcctcccaaagtgctgggattacaggcgtgagccaccgcgcccggccagaagtaattattctttgagagtaatgagggatagagcggtggccaggggagatgtgaggcctgaaggagctgaaggggtgagctccactgacgtctgccaaagaacctgcggacggacagcagcatggccttggtcaggcaggagcatgtgtaggagttggagaaagtgagggggcccgaggaaggggagtgcagctggctggtccctgaggctctgggcccagaatctacagcctctgctaggcctttgggaggactctggctttgacccagaggagaaggggaggtgactgaagcaagactgaggcttcgtgggcctcacctcatagcaacacccgctgctgctgcagcttggacatcagctgcccggagcgggggtccaggcagtgaggatgaggaggcggtgggaagtggccaaagtcaggactcattttgaagatggcgcagaaggatttgctgatgcagagtgtgagagagccaggaagatgactccgaggactttgccttgagccaaaagctatggttctcatttccttgagacggggaaggtgatgggtgggaagcaggagctccatcagagcacgaacccggtgttgtgcagcttggactttcccagacgccccaggggttgagggaggcaggggcggcagggagagtgggcagagggtgctcctccagacacagctctgtgtccctgcccacgtccttgcctttggccttcgctctaggagatccctgctagtttccatgctccatctctgccttcccaggagtgttctcccctcttagagactggatctgttcctgggccacagcctcctcctccctggagccccaagcattctgaggggctcccaggtcaggagggcccccccacctcaccatccctctctgctcctcatctggggcctcccccagactttcttgctgacggcacctggccctctccctctgcagccatgacctgcttgtcaggctcccgttggtccccatggctgtcagacatacctgggtctcaggtataatcccagttgcagttatttcccacatgcctctttacttcatgaaaacgaaggctccaaccttccatgaccattaaggcttttccagaatcttccatgacagttgagcgcacagaggatctctagaggatttgtgacttcagtgcacatgcggacactcttccctcggatacagctggaaattcttgttataaatatgcttaaagttgctggttcccaactcccagtgtattggcaggtgttggactggtcgcctgaggattaccccagccccagagtcagccccagagtcagagattagggtttcatggtgcaagggagggacctgggaatcaggatttaggaaatgctaacacacccctactggtattgttgttgttctattattaattaattaattaatattttaggacagggtctcactccgtcacccaggatgaagggcaatggtgcaaacatagctcactgcagcctcaaactcctgggctcaagtgatccttccatctcagtctccccagtaggtgggactacaggcatgcaccaccacacccagctaattttttaattttttaaagatgaggtctcacactgctgcccaagctggtctcaaactcctggcctcaagcagtcctcctgccttgacctcctaaagtgacaatcctcccaaagggggttataggcatgagccaccaccatgcccagccacctctactgatgttgatcaccgggcaggcttgggaaaactgctttagctgtaagaggggagggtgttctacccccagagaggttctcttactttttcctttaagcagatcactacagcctctagcctgcaggggctccaggcagtccatcacacatactgggttgtacagaatttatataaggacagagttgggaagctggagggggacaaaaccctgcaatcttctgccgtctaaaatttagagcctattttggtgagacaagactgtatagaacagatacaaatagatgtatattaatattctgcaacagagggggtatggctggcaggcaaaatagaagtaaggaaaagctggatttgtggaggccaaaggtgccctcgaggctgcaggttggtaaagagttcatgttgccatccaaactatgacccctctgcttctgtcccttggtgtggaaccattctctgcagagatgagcccaggctgtggctgcaatgggagtggcttgcatgtcactcactgaagcagcaaaagcaatccactgtctggattggtgatgagctgggaatctctcaagggagtgacctaggaggcaggtgggccagagggggccagagggaaatgagattgttctgttcttgctcttgctccctcagggccatgtccttttgccatggtgcacttcctggtcctgagctgaccctcacacaggtgcccaccctgcatccagcagtcattagtaggttccccctcccactttgtcatgagaaagggattttcccaggatcgctgtatttatagtggagagaggccccaggactgtaaggagtggggacctcctccccaggaatcccactgaaagcccatgtcccctcaggaccgagctcctgcccactcagaggactcgtgctttgagctgccccagtgggtgtgacaggtttgctataatctaggatttcccagactcacctgctgatcagaatcctgtaggatgcttgttagaaacaaagatatctgggccccaaactacagctaatgaatcacaatctcaagaggaaaggcccttaaagaaacaattcttaggacagcgtaaacttgggaaaccaccaagccatgaactctctcttacccgtgggtgacctaattcctgcctctgctagaaggctgctgcctataggctgagctcagactggcattcatggtgggggaaaaaaagctttctttctgtttagagaccaacagtgacaacaatgattaccaacctttatcaactatgtgccaggcactctacagggggctctttggggaaaggtggatcatgtcacgcaatcctgccatagcctaatgaagcaagggctacaacaatctccatttttttgatggggatgcagaaggcagggaagtgaaatgtcttgcccagaggcacatgcagcaggtagccggcagagctaggtcgcgggcttctgaccactgtccccctctcttccccaacagattaatcatcttgagaccttgaattaactccctccagggtggcaactcacaccaccaccaacacgcatcccccacgggcagggaaaaagagcatagagtggcagctcctctgagaacctgcagtgggcagttgtgagaatgaggcacgatggggaggacagcaaggggcagagtgctgacctccctcctgttggctctcaggtactggaactccttgagcaacctggtggcatccttgctgaactctgtgcgctccatcgcctccctgctccttctcctcttcctcttcatcatcatcttctccctcctggggatgcagctctttggaggaaagttcaactttgatgagatgcagacccggaggagcacattcgataacttcccccagtccctcctcactgtgtttcaggtatggactcttctctgctgggattcggactcggggtggttgagtggcggggtggtgggaggagtgtgggaagctgcacccttttaccgggcagccacagccatcctagatcagccctggagagcccatgcccgggagagtcttgagttttttctgtagtttccctgtccccatctgccatggaattccactagtgggtggaccattaggggaaacaatataagtggtttaaaaatgccttctcaggagaatctcttgaacccaggaggcagaggttgcagtgagccaagattgcaccactgcacactctagcctaggtgacggagcaagactccgtctcaaataaaaaaaaaaaaaatcgttcttatccatggaatcctttacttaaattctccatgaaagcccaaaacataaagaaaagcagactgctcttactgggggaggggagggtgacgaaaccctggctttcctaccatgcttgtctcttgaaaaaaatattactagcccatcaaatttgtgatttcatagatattttggcttagggcaaactcaaagtggcatctatttaagtttaaaagcagatcgattgagaggtaaaaatgaatcacatgtagatgttgtcaaagtcttgaagatgatgccccagtgacgaatgtttggggaaagctggtgtagcctgtggctgtctcagcaaacacacaactgcaaaagggtcctgacgccttacccccaggaatggctgacggtcagctcaagcatgtgtggggaaagtcagagatctttgggccaaaaagcccttttagtcacccttcaaataatattatgccaatagccaggcattttgtctaaggacagttcaatagctcagagcccctggggaggagaattgggggccaggaggagggaaagaagtgaaagggaaattttggacaattttgttgacgtagtggggcagggcagggtggttttgggtttgctgttggtctaacgctgtgtcccttattggtgggaatgtgtcattcagatcctgaccggggaggactggaattcggtgatgtatgatgggatcatggcttatggcggcccctcttttccagggatgttagtctgtatttacttcatcatcctcttcatctgtggaaactgtatcctttgctgctgccccccacccctgcggcccccagcccccagcctgcagcacagtgccaaacgggcacgcccctcaggtccgggcggtcctgctcgggctcacaccacccagcctagaaccccatggcggcggaggtgggtctgggtggaaacctgcagctttggcatgggtgaggttcaccttcctgaaccctccgggcccgcagcggcgccgcgctccgggcgggctgtcgccgtaatctgggtgagcggcgccccctggcgttgcggcgtgtgcggccactcacaccgcctgcgatagggacgcgcgggagcgggccggctgccctggggccgcggcgtctgctcagaggcgggacgctccgggagggaggatgagccgttgtccttcaagtgaccttcagctctcctcctgctttttggtcagcagccctctctctgatgctgctctccaggactttagtcacgggcagagctgcacagacttcaaacagccccaaaagctccttcctgatcccggctggggcaggtttccagggcacaagccacgggtgctgcttctcttccccagctcataaccccgagagagtcacgtccagagccaggggtaacataggaacagctctgggccaagtcccagctaaggcagtgcagaaaacacagtcatggaagcctgcagacaaggtttcctcttttcccagctggatgacctcttgcagattgaaggtcctctacctcagtgtctgtaaaatgtggcaatggaatcatagaacctactacataaagggtcgttgggagttttcatgggatcatgcatgcaaggcctctgccacattcagaagccaccctggacaaagcccctcttccccagcctgggttgctgcggcttccctgtgtgtgaaatgatatgaatgtctgggtgcctggggccgggggtcagacttcacagacttaaagcccccttccagctatgctttcgttgattctgcagttctctgacccacagtgtttctgttggtggagtggggaggagaaagggcaaagaactgtctccactgggaactcccaagccttggctggctccagatggaccctccaagggtcttcgtgggtgcaggctcacattaagagttggcagagataccaagccaccccctcagcgcccagttataataaaccgctcttaagagcgttctgcatcctgctagagacaatgctgtttataatgtcaattacagccagtcatctcagcagggaaagcaatcatgaaacccagcaattaaagtgcaaggcagggcttgctgcctccctcccgcctgctccagtgtgcaggctagcctgttctcatccctcttgatagctccaggtagctaggagggtgatggggaggaaggggaggggaggaacactgttggggtctgactccctcaaattgcttccccctcaagctctctctgctgaggagctctaccctgcacgccccacatcccccgtgcccctgtgcccaccaaaaccccaaaccaagggtcattttctttaagaatggacacaaacagatatcctactgaatgtgttcttggccattgctgtggacaacctggctgatgctgagagcctcacatctgcccaaaaggaggaggaagaggagaaggagagaaagaagctggccaggtaaccctctaagcttgcccaggcctggggctccagggctcccattgtggaatgtcttcccactggtggcagagagaggcttgactgctagcctctgttggctctccctcctaggaggactctgggtttggggcttcctaagttgggcctctctcctaattcctaagcatcactctggtagggaccatcatgaattataataatctctgcaatggtgtcatattctccacctgctgggattatcttttgagaagctgtgataggtggcaggagtgtagggtggggagagagaaaggtaaccactcagttgggaaacgcagctccagcttacagagggagtcctcctcactactttataattcatctccagtgttaggaaggcaagacggggccctatgttgtatcctatcattatctagacgggacagttccaggccacacagctgccgggcactgagcagagctcctccaggagccaatcctagatgagatccaccatccttttctgctttggcgacccaggcatctctggagctgcaagaggccaattgcgtgtcaggcagagcaggtgtagctcagccccatagcacttgtgactgagctgcacacgagaagcgtcctggagaaaggaagatggactcagacccaggggatctgtcccctctggccccaacaggccacagggcggttccctcctacactgttccctatcactccagtaaacagccatttatttttttctgctgctgactggccaggactgccagcccagagaagaaacaagagttggtggagaagccggcagtgggggaatccaaggaggagaagattgagctgaaatccatcacggctgacggagagtctccacccgccaccaaggtgaggagctgtctccttcctggagctgtgaggccggtgctggggagggagggccacagccttcccaggccagaaccctgtggagaagaggagagaaagaaagacacccagtggaaagaaagccagtggggatgaacaggagagctgggagggggaagataaggcagattggctggatcccagccatctgctgatgtcttgaaggagatatgcaaagtgacaagtacctatttttgagctaagtcactgactaaaatgcaacttcaaggctactgcaagcctcttaacttggggacgtatctaactattcttcccccttctcccctgtgactgtctagatcaacatggatgacctccagcccaatgaaaatgaggataagagcccctaccccaacccagaaactacaggtaccagtcccactgcctaacctgggattgggagattgggggcagagatctaaattctaaagccacgtgggagtggccatatattagggaccatggttccagtgtccctctgtaagtaccttccactgctgagtgtcttctatctctatatttaagcatcatcagtcagcatctgggaggcaggtttgtttctggtttcctcataatgagatcacatttgagcagtgcttttgtgtcctttccaagttggattcagtgtacatttaaatttttgttacattacatgttgtaaaatcatcattaatttatataatgtattagtatggcatatgttgcaacattatgctcacttaatattaatagtcaatcccaagtctgccttgcccctactcaggaggcagtgccgagtgcagggacagctgccaccacagatgtcccacttgttgctttaggcaatgatttcaggtctcattataaaaggcgcgcttactgactccatctttttatgcttctatctgatacctaaattggcaggcagtctgcttctcaagagctttaatgtcagagatcagaggtcctccctccaggcttcacttccctgctccctgaaatcccataccctgtgcaaggcctgggcttgccttcctctgacctaggattgcagatattatcgccagtttcaagcttgaagtcaataacatgctatcaagggactgttgattttactgacatttccttgttcctgtaggttaggctatatttgggttgttcaccaagttaggtggctgagaacctcctacatttatgagcaaagctcggtttccctttttgctttccctccgctggttctctgcttagaacactcacaggcatccttgggaaccagactccctgtggtcacaccatcctcactcccctcctcctgcaagggaataggatgtggtttcctggagcttggatagaaagaacaggaagggcgttttcatatgcccggcattaaggctttgaagttcttaaaaccccttctagggtgaaaccgttagggaatttcaacgacgtactagaattattgaacaaatgcaatgggaggatcttgccttgatcctgaagcaacaaatacactttaaaatgacgttttagagggaaatgggggaaattgaatatggactgggaactaaatgattgaaagtagttttgttaatcttgttggtataatattttgtagttctgtttttaaactgctgcagtgtttatggccagagtctaaatgtttacgagttgctttgcttttaaaatattccaacaaaaaaaaaatggggacagagaagataaatggaacaagattagcaaaatgtccaaagttgttgaagctggttatatatatgaggtttagtatgtgagactgtactcttgtgtaaatctttaaggtttaaaatgaaagacagtaataaaacaaattccttagagccctgagaagagccctcccatggggccagcctccaggatgggcctccctgcacacacaacagggcagatctagcatgagggtcttttcacacaggcacccagctgcagccaggcctgtacggcagatacacctcttgcatcttcaacaaaaatctcaaattctattaatctatactcttggcttttcttttctttgttgctctaatgaaatcaaagagaagaatgttaattttaaaaaaaaagggctaatgaggattttgtcaccaggtcggccatcctagaaatgcctctcacgtagctacccagtggctctgaggactgggggatgcttacgctttccagctgaaaagctcttcccaccctctgctgaggcctcaggattcttgagatttttgagtgtacggcccgctccccgtcatttctgttggttacatgtgtctctttactttcgtgttgagacctctggtccataccctgaggctgccctgactgccccaccacgtacaccagccaccactccggcctctgaagccagccccaagcatgcccatttgtgcactatccctggtttccaggtcctcatccaggaggtccaaagggcagcatgctcttaaagctggtggccccacacatcactctgcccccaaaggctaagttagcttgtgcttcccagctcttcctgccttcccatttcctcccttccctgcctccacagtcagctcctggatcctttagtgccaggtgcagcagaagttcccagagactcctccgaagatcacgtggcctgttgtctctgttctggtcaatctctggttccttcctgcttcttgttctcccgaaccacgaatggcaaagatcctgatctaccattgtgctcccaaccgctgccccttccaggccgctggcccctgccatgcctggttcatgcaggtaccccttagcaggcagcactggtgagtgtccctcctgctctgccttcagccagaccactagggagaaagggccggtgtcagggagcacactgccatgctctcctgctccctccctgtctctctcttgccctgtctcctaggcttgccccctgccctctccctctctcctgggctgtccagattgcacccaaagtgatgtatcagagtggccaagtgggagctggactccagagtgcactctgctggctgcagcttcaattaccctcgcatgaccgcgaatactcagaggaggggcctgtttctaattcaacaaggggccatcgaggccagccatggccctagaatccttccctctctgtttcatctgaaaagctcgccagctgctttcaacctcccagatcggtataccctaattatagagaaaaacccaactcactgaaaaggaaagcattgtgcccagatgagtggaagctaattctacttttgtttaatttattaatttatttgagtgagcatgcagatgtttgcaagagccactaaggacttaaagttaacaggtacacactaaaaaaaaaggagtgccaccagacactgagtagtcagcaccgcctgtgctgggggaggctttcattgctgcagagggttcaaggacaaggagagccatgaggtggtggagtctgggggcttcatgcagaagggtggtcttgactgagctttgagtcagggagttggagaggctgaaggagttttttcaggatcgtacaatcatcagagatgctgagagttgggaggaaccttgtagatattcatgaactactcatgaagcatttaatgtgtgccaggcactgtgctaggtaccagggacatgggggtccttgttgtgggcaaacagggaagacccccaccctcctggaactgacatatcagtggggagacaggcagcagacaaaccaaccaaaaaggtgacatcacatgatgtgaagatagtaaaatcaaggattgtgttaggggatactcaggggtcaggctgctttgactgtgtggtcagcaaaggcttctctgaggacacagcatttgactggaacctgaaggattcaaaagaactagacatggaatcggagcgaagagctctctaggtggagaccctgagtgcagagtctcttacagggatgcacttggctgtggggactccaaagagggccagtgtgcctgcagcagagagaaccaagggatagtgccctgaggcgagaggccggggcagggcaggagggcagggcagaaggcgcagggccatgcgggaggctgggtctgatccagtgccctagagggccaccagaacgtctgagcagaggaggccctgacctgatgtccgactcaccctttcagagattccctctgagcggtgtgaataaagagcagtggtgttcgagagcagaatgggggcagggaggatacttgcgcagtatccaggcagagaggatggcagcttggacaggggatggtgccggagatgcagagaagtggtcaggcttggggtacattttgcaggtaggaccagctggattcactcacagcttagatgttggagagagggaaagagaaatgtagggtgattctgaggttttctaattgagccagcgaagagaaaatccccaatgcagaaactgtatccaccacctgtgctccttgtgccccaaggcactgctccgggtgtctggcccttaccaaccaggcactcccttcagctggtagcagactcttgcgccctgctagaaactaagctccttgaggacaagaaccatggctttgtcttctcagccttgggctcaatactctgtaggcactagatcctacaaatgtctttactttatgtggccaagagcaaaatcacagaagtgaggatgagcatcagatggaggggggcaagggttgccaaggaccaagggtggggctttgagtgctaccctggttttactttggaatcctctgacctgccttctgaaatgcagcagcaactccagcgtgcagcagcacctcacttccgatgcttttttccaaacctccaagaacaaaaattagaaaagaaagatccctaatgtattctactggcatttgggagtaggaggctaggtggttcagttgccaaccccaaaatgagccttgcctgactttccctgatctgtcagcatccctcctcatccataatacctgctaagcatcacgtgctgtcaaagttgtgttcctttacaaatctgagtttgtccttcagaaatcgtttcctcttaagtactgtgcctgaggttcagctgctgtgtgtctgaatggaccagctaacttgcttctccccaggaatggagctcagcatggagcttcataaacgggggggagctcgtgcagatgtaagagcctgcaccgttttccattaggaagttcgaatggcacaaagctatagtaaatatgggtttctgtaaacacaaatgattaaaataagcataaaattacctgttatcaaattatcatgaagaagaaagtgttgggtcatttcgagcaaaactgaaaagaatacaaacacctaggcaggaatttaagatccttctcaattaaatttcacttgaaataccatgatttaggccaattctggttttacttattcgactttaagtagaagacttttcttttacataccaagggttgggtgtcacaagaactccaactcttgtcctgtagacagtttttcatcttgggcctctcttctgctgaaaaaatattaattgtcttgctggtcagctctaattaccctagggaaagaatctgattgatgtctgtatggtactggccctccaaaaaagccttgggtccctaaatgcttgaatgctttttgcttgataaagaattgctttctgtgccaggcattttttttttctttgcagtacctggctttgtttgaaccagaagagggagaacatgcagaggcacagctgtgtccatgagacgagcatcccataactatctttctccagccagactagtatccccttcaccttcatcttatacagagtccccttccttctgaccggtgtggaagttcaatcatcatcaagaaataagggcttctagtgccaggcaaagcttttctttccagggttttcagcacatagggagaagggacagacatttaaaatcagtcatcaaggtactggaggcagaggttctgctgggatccatggaaaggtcattccctggagcgtgagtactcaggaaagttggaaggaggatgctatctggattgggggtccttgtgtgctctgcagagagggagatgaagcgcagctcaaacagagagagagagagcatgaggaaggacggagcacacagtgagcttgtcagctcactagggctgccataaccagtgaccacacactgggcagcttaaacagcagaaatgcatccttttacagttctagaggctggaagtccaaaatcaaggggtctgcagggccaagcgccttctgaaaggctcttgggaagaatcctcacttgcctctcctaacttcttgtggttgccggcagtccttggcttgtagatgcatccctccaatctctgcctctgtcttcacatggccttcttccctaagtgtgtttttgtgtctctgtgcctgtcttgatgaggataacagtcattacatttagggcccatcctagcgcagaataacttcttcataaccaattacatctgcaaaggccatatttccaaataaggtcacattgcaaagttctaggtaggcatgagtttgcgggggaaactgttcaacccactgtagtgaagtgctcagaaaatagtttcgtgtgagtggacagtttgttagggaataataggtggtaaggatctgactgagaaagatgttgagcattaatttacaggcttcgagtctgtcccataggtagaggttgtaataaaagcagcaaacacttacttacagagcggctgctatgtgccaggcaccgttctgaggtatagaggtactgttattattattccaccttagatggagaaactgaggcacagagagactcaataaaatgcccacggctagaaagaaacagagccaggattctggtccaggcgattggctggagagtctgctcttcactcccatgttgttactttcccctctgagcatcttcaacacatttgagcagcccaggatgggcagtgcttcccgtcatgagcgttgtgctggcaagcacaggaataagctgtctgactttggtccacattaaatgtggccactggctgggagaacgaaggcgcttctttaattggtgtcagtgtctaaacctttgcatgaagggcctgctgtggtcagtagtattgccctgttatctcgacagcacatgaatttttttttttttttttttttagttgcagaaattgggaaagtgttggtttctaattcctggaacttccaagagtgaggttatttgcaagggattccacaagccaactcagccataccctttccccaacctgcggcctagatagatgagtaacacctggcagtgccctgtcctacctggtcaccttttttcataccttacaactaggatgaccaacgaccccagtttgcccagaactagggggtttcctgggatgtgggaattttagttttaaaaccagaacaagttggtcgccctacttacaatcccccttattgtgcactgccagatacgacttctccagcagagatgagctgcagcagcacccacagggagacagcagaatgtctgtcttggttggtaccctacattttcagagccataatcatgtctgccagtaggaaggtctctgaaagtggtaaaataagtgggagtgctggagttatttagaatggtgctgttcttcttacaggagaagaggatgaggaggagccagagatgcctgtcggccctcgcccacgaccactctctgagcttcaccttaaggaaaaggcagtgcccatgccagaagccagcgcgtttttcatcttcagctctaacaacaggtgtgcagcaatggtggggaaggtggggtcctgctctctctagtaccagcctggcagttgcctgtattttacctgaacctctggatggagactgagactctcccagctccttgcaaattgtataaacaggcactcatttagggaagagtcctggattttgaatcagaagacttgtgtttatttttctctccactttttgaaatgtttaaactctatttctattctttgggtgattacccttgataatttactaattctatttaacttaacaaaatgtgatgttaaacaatatcaagaacctcctcctgtataatagagtgaccttagactattttaactcactcatctgctccttacttacatggaattgtcgttagtattttagtccaacttttatttttaatccaacaagttagtgagtcttactgttatatagatactgtgtgtttggatatatgtacaccttaccattttatttgttcaccatttttttactcatttcagtccatcctttagctagcattttctttcttcctaaagtacattctttagaggctcctttagttccgtaatggcaaattcagtgggcctctacttacctataactgtttcacttcttgctcttgaaagatagttttgctgtgtacacgattttagacagacaatttttgtcctgcagcacaagaaaggtgttattccactgtaaagtcagctgtcattccaactatggtttctttgtgagtaacctaacgtttatttgtagctgcttttaacatattctgttgcctttgtggttgtacagatttactaccatgtgtcaaggtgtggatttctttccatttgtcttgcttagaatacattctgcttcctaagcctatgtatttagatttttattcagttattgaaaaagtacagccataatgtttaaatattgcttctttttaattctatatttcttccttctgacactccaattggacatctgttagacattttcattctgtcctccctgtttcttagagggtcttacatatctttcatctccttgtctttctgtattctgggaaatttcttcaactgtatcttccagtttcttaattctattttcaacttaatctatattactgtttaaaccaattttttatcttgaccattatatgtttttgtttcagtcagttccatttgttgcttgattttccagatccatctctaaatctagtagtttctatcaattcctcatctttgtgatttagtcctttatttcattaaatatttcaaatatagttgttttatagtctatatctaatatttccaatacctccagtctttggaatctaaatcacttatccagtgtttcttcagatttcccatcttaggggcttgtccttttgtgcatctgatgatctttgattgtgaccccaacacttcctcttcatttgtgagagtcctgaagacctaaagtaggtctggggagactttcttccagatgccccttggaggtgttggcttggcctaaaattcccaggctttcctgccccacctcaagactggcttaacctgcaatttcttgacagcactgctgttattggcttccatcttcaagcaattctgccctcctggctggctctctctccatacgtagcctcagctcagtggaggttggtgggaggggttgttggtttgaagcagatgattcttacagccatctcctaactcttataaaccagaattgtctgagagagtttggcccttcgagggtttggtgcttctgcagcaggagggcttctcagagcatttagtcaaccataatgccaggagcagaagtctgaaggcctgggttgaagccctgactctcccacactaaggctgtgtttctgggcaagcctctcctacttgggtttcagtgttcttacctgtgaaatgaagatgatgacacccatcccttccttcctacattgctgtcaagatgagatggtgtacaagacactttggcatttaggaacctagcatttttggtgctatcactgagtgcctagaagctcagttgggtaattgtgctggggcatggaagtgaattgcacatttaaagctattacacaggagcagatcacctacagagagccggtttggctggcctctcagcatacccagctccgggtagtcctattgtgccttatgcataagcatagagttgatctcataaagtgatttcttttcaatgatagggaaaataagtccccaaacaaaagccagttatgaatgtcagagcaggatttgggaattcagagattctcaaaggtctcagatgtaaccttctaaaatatcaaagatgatatgtgcaccatgggggtgagcagttgtcattaccaagcagcagtaagacttcagaatgaagaggtcacttcaggccaacaagcacctgttgccagctgctggggagagctgaggagaggggctcccaagagccgactggtgcttccccttgtctgccttgacttgtctctcctcctgtcccctctcccgtacaggtttcgcctccagtgccaccgcattgtcaatgacacgatcttcaccaacctgatcctcttcttcattctgctcagcagcatttccctggctgctgaggacccggtccagcacacctccttcaggaaccatgtatgcatcgcctgtgtcttctgcactccttccccctggggctgtgccaggcccacagcttctgttgctgacatcattgttcaatcaggagcccaattctaggtgtcataattagatccacaactaacatttcattaagagagtagggctttgatagaaaaccaccctaggaccacaagcaaataaaagagcatgtacccaaatgctcaggctggtttgataattggcaaagatcaggactttcattgcctgtggatgttccccaggaagctctagttccctgcaaacttagtaaaatgtggccactgactacatgccctcccttgctcccagcatgctctgaccagaaggggagcattggcaaataggtgccaatgatatggctgaccttacctaaaagagagtcttggtacctttggtagagtagaaccaaatgtgaggacccacccaaggctctggtgaacaatattaaaggccagtttaagaattgctctatctcaaaacctcaaaactttgtcaagtcccaaccaagtgggcatgaagacagcccgctgatctaaagccatacccatgccaaaccactctgcgctcctggggcctgcttggtccagggctgtcttaccgaggttagcaggtgttggccccatccctgatccatcacctgaaatataataagtatgcagtcctggagccggtcctcagcctgtgcagacctcacctgaaggatgcacctcccttgccccagaggacataacccaggaatagatgtccaccatcacaggaagctggccagctcagtcccaccaacgtgagcgaagcattttgaatctccctgcaaaaagacaaaccccattctctgtccttttgacaagtatcttagtggtctgatttgggtttgtaagtaaattggattaatgggaaaagcatccaaccagatgctgctcagatccagtaccagctgaggcatgccctggaagctcacctcacttatctgggggcttcaagggaagccgctgtgctgcctgaggctagccccgcctcaggatgtctgtgtgtgtgccgcttgccccccatgtccatctgtgtccctgtgcaaaggcttaagtgccaggcatctcattttgaagtgtggccccttttctggtgaacatccactgacctctcttcccgtcctgcttttctcccttccccatcccatccccaccctgttcctttttgttttgcagattctgttttattttgatattgtttttaccaccattttcaccattgaaattgctctgaaggtaaagcccccatccccttctgctcctcctgtcccccttgtgccagcaccaggtctctgccgctgtctgtcgctaacacacatgctccttcctgttggtgtggggttcactctcagagccactaatccaattatgcttatttttcagatcctaggcaatgcagactatgtcttcactagtatctttacattagaaattatccttaaggtaatgcaacctgggcaatgcatcctctgtcgctttctttgtctatctctgctctgtgtggctggatcttttgtcttttctgtttctttcactctctcttttctttactcccaagcctgaaattggaaaaatgagtgcccctcactttgtgtgatgcactttgcccagacttagaagccaggagcagcctaccccaccacagctcctccctccagccacccctaagcagtccgtggcctggaagggacacgtgttggctgtgccaacattaaggctgccatttcactggttggggctgcagccgtcagcagcgccagacatacatgcccacatgcaccagctccggttaactgatacctgagcccacgtaggactctccttccctcctcctgcttcatacactctgaaagtgggaaacctcctggggcgtgaaagaatcacttgagctactctctttggatgcccatccttagcaccttcctcagtacttgcagcagatattgggtctaagctggagttggggctgtgtcacagtgatcacaggcctactgtgagatgtggagctggtctcccagctgagggcttttagcagggccattacagactactgccgaccctcagtcacctgctgcaaagctttgtcacagtgccccttgccctgagcgtgggggagggagaattgtgctggagagctgagtacagcaggatgagagcaggtgccgcaaggaacctgagcacccagcccccagcccccagcccttgcctgctgctggcccagctcagttctgctaagggaactgctgcaacattgctaccctcagaacaggcagagcccacctcagggcaacactgggatgagagaaagagtattcctccatttttcgggtatatttctgagtctctaaaccaatgcgtggcaagccagttcatctgagagtcagggtgtgagttccatgacctcagggaacgtgtgctcctctctgagcaagggggtagattctaccctttccccaaacagaaggactaaggctctgaagcccatgcttcagctttagcttcttcctgggagactagcctgggactccccctcccaaggagtccaggctcccttgtcatcctatcgctgtggccaatgcaagctgaagtccacacctaaccgatgccactgccagctgcaggcctctccttccctgatgagactccctcatcatggcccagcctgttgatggacaggacagttcagtcacatccagatacaaattgaatggggcagtttttatgtgccttcccctgtgtccttgtccccaggacactcaggtgcccccagctgccatccctggttcctgctaaccaagtatgtggctcagatttttcttttctgctcgtggagagtagatctgaccaggccttggttcctggaggtcgggagagggaaccgaaagttgcgtggctgcactaagatgcaccgcggcaaaacctgctttccatggtgagctgctttgcttcccggacttcagatgcagggaggcacacagaccccagagttctttcccaggacaagagacgctctgaggcccaattctcagtgcccttctacagagctgcccttgtggatttcaatggtgctatttctccttcgggattgccatacaagctgaagtgaaaggtctctttgcaagcattgtcatggcaaggtccttccatcccctccctcttctactttcttctatgctcagcatgcttctgaatagaaaccccaatgccggaacactcccctgtacctccttcccactgggtccctcttcccggcctaaggcccggtgtcatgtcatggcacagatgaccgtggctgtccaagggggacatttagcacaaggaacagtggaagggcctggaaatgtttggccttaaaaaggaaaggcttgtaggctcacaacagttggcctgagtcatacaaaggaccgtcacatagaagaggaagaaggcagaatcaagaccaatgagtagaaatcacaaaaaaagacaggtttcatagctagaagagctgcctggagaggcagggatggcccgtggttgaacagagagctttcctacccttccaggcagagctagcgagccacgtcccattcctttccttcctcaggatggaaacaccccagcaagggccccttcccaagtaatggtgtagaattaggaaagcaggaccgaggtggctggcaatcagaaaaaaagggtcaaagaggaacaattagcactgggtacctgagtctggcttttcctgatgccctgaacaccacagatgactttcaagtaaatgctacgttttccccatgtccatttgccctttcttgtacagccactcttcctctggccctgcctggatgcatgttcccaccgcccccacatgcacacacatgcacttgctcaagtgttggtctcatttgagggtccctaaacaaaacaggagcccaaaaccagaggacagagttggcactctgagccttattagtccacccatctgaggaatgcagagtgttctgttagagctcagtagtagcctcagaagatccaagccaggagcaagaagggatcagacccagtgccttcctaacactaaaagcaaggtggctggggaagtactgggctttctgcaggcacaattaatatgaattatgggagcctcctgagtccagtctgtgggggtcccagctcttcaccaagaggcagggaggcaaggcttccagatggtgggccttctagaactatactcccttgcatcttttatgtaatctacccacttctaaaaaccattgcccaacacaggtgcctgagtcctttgggaccccctgctgcaagagataaatggaaagaattaggttgcaagagctatttttgcccatttccctctgtgtttgcttttgaatggctctgcggacactctgccctgggcatgctctgattccaaagagatgaactggaccccagatgaccggggagccttgctccacctctccactgtcggctccacattttccctttggccgatgcttcctgtccgctgcctgtcacagcccttatcctggataaccactggcccttacgcaagtcggcaaaatgagaaaggctgtaaaggtgatttgttgagcacctgcagtgcgcagctttacaccaggctcagagggtggtaataatggccaagtcctgtagcagtcatcgtcatcttgtgtgttctctttttaaaagtttccaaagggctttcacaaagccaggggatagtttcctcaccttttgatgagaaaacagaacttttctcatccaggaagcatccagaattcaaatccaggctgtagtgacagctcacccttttatggggctcaccgtgtgcagggtggcatcctaagtattttacatagaggtacccacttgatgcttacaaccctgtagggtagaccttatcctcatttttccaatgaggaaacagaggcactaagagaatttgagtttcttgctccaggccacaaaaataaaataccacaggtctgggattccagcccaggccgtctggcctcagagcctgtgctcttagccactgagcctcatagcccctctgatcacacaacttttgcccttaaagaactccagatgtagtctagaagcaggacagtagaattgagtttagaatatttggcatcaataataagcaccctttgaggccaggaaggggaggtatgctaattgccagggtcaccactggaacttctcaccaggcaccagggtgaccagctggcctagtttgcctaagactgaggagttttctgggatgcaggatttctgatgataaagcaaatctgggcaaaccaggatggctggtcaccctgctgggcatgccccgccccccaacccacccactcacggcagatgtctggtgctctcagctggcctaaggactcaagcatttggagaggcagtcgggatgtgtgctcccaacccgacagcatcaggaaaggaccctgcaggcccaaagccatggacttgggatgtggaacagtgcgaaattagagtgggatggtggggcccacttgaaagggctttgaatggaggactaaagagcctggcttggcctggcaggtgcaaggagccacccagcagtcctgggctgcgagagtcttgggtggttgtgtgcatggtagcagaactcttttcttggcaccatagcgccgtctttgtccttcctgttccccatggatggtgcttgggacttgcccaagggatgctgtgggaggaaggggtggtgtgaggggtctctgggctagggctagggccactcacactggtgttcctttgtccctccctgcagatgactgcttatggggctttcttgcacaagggttctttctgccggaactacttcaacatcctggacctgctggtggtcagcgtgtccctcatctcctttggcatccagtgagtgggagcccctcagcccacgatgggccatgcagctagcaaggggtgccagagaggacaaccagaccctggagggcctgcctgcagggccaccgcagtgtgatgagagtggggtggggcctccaaagctgtgcatggtggctttgggttcttggttctgtgtcctcagtggtctgatacttggggcacgttgatcaggtgagaatatgtttaattatctgggttttgccatgacaggcagggccaggctcagctattaagaaacggttgtctccaggaccttcctgcctcctccaccacggccccagtgccctaggctgaccttcagcaacccacagtctgccactgccgtgacctcccctgacctggaccctccttctccctttctctcccctctctctccagccaaagcacctcatgtatgagtgtatgtgtgaatgtgtgtatatatatgtctgtgtaagtgtggggtgtatgtgtgcacgtgtgtggatgtgtggggtgtgtgtatatgtggatgtgtgtttgtggctgtgtgtatgtgtgtgtatgtatgtgtttgtgtttgtgtctgcatatgtgtctatggacgtgaatgtatatgtgtatgtatgtgcatatgtatgtgtgagtgcatgtatgtgtgtgactgtgtatatttgtgtcttgtgtgtgtgtgtgtgtgtgtgtgtgtgtgtgtgtgtgtgagtttttcatttcactggtctggggtacagtctgggtgtgagttctaagagctttccaggtgactcccctgtacagccaagcttgcagtcctcgttcaggtgtggaggatctgattaccagtttctaccaagttctaacagctgatagtgtgaatcctacactttaactttcaaagcacttccacatacacattcttctgtggtcctcacacacacaaaacgatgggggagacggggcaagtgttatcatgattgtatagatgggaaatttggagttcaggacatcatgacacttgctcaaggtcacacctgtggtagagaaaggcctaagtcccagcgttcctgggtctctcctcccaagagtgttttcatggttggctgagatcatgcagggaccaggaccttgggagagacccttttctgtgatcatcagttatattaccccatattttctgcctgggagcctacaagtccagatttgaatcccagcatggccactcagtcactatttaaccttgaatgaggaattcctcctctttagcctgtgtttttcccatctgacctttaaatcccttccattgtgattcggtgcaaactgactccctcccagagagactgtaggagagacacagtgatagataggaatggcctttgcatctcttggaataaaagagtcatgcaccagagaaatcggatctttccaccagccccttgagcacatcatcctgaccacacaaagcatgaaatcagcgcttgctggcctgtcattcattgtttaggtcccaagacaagtatgaggctctccaaaagcttgagaggctatctcaggtagttagcccgtgagggttaggatgtgctccatagctgctcaccaaggtggtatggttaatgagccccacctgggtaggatggacagctccaaaaaccatccaggcatcttgcttagggacctgtctcctgctgtctccattgcactagggaaaagccgtagcccgagactccgagaagctctggcttggcctcagcatcccaggtgtatggaacctgtagtgccacgtaggagccaaagggactggccttctgaagggtcactgaaaaatcaactgacaaaagaaaggttaattggagacaaagcattcacatttatttaacgtgtatacacagagcctatagaatgcagacccaaagatacaggggaaactgaccatttttctgcttaggttcaaaaaagtatggacagccatgtagaaatgtgattggacaagaagcgtaggatctaacgtgaatggaccgagtggggaacccagcaaggcctgtctctaggttcttcttgtgctctctgtgaagctttccctccttctgggtcggggcaggatcccgtctgcaacaggagtctgaggatctacactcccacatggtggatctggtcattttttatggccagtttttatacagaaaaggagagggaaattttgaataatattttaggttgtgtggctggctttgaggaaacggggttctgggttctggtttctgtgacccatcttggggaagagggattctagtgtctatggctagcctgagaggagaaggggactgagacaggagggcaagagaaggtcagagaaaaacttttgcttctgagactgcttctaaggccgtcgtttcggggtgttgtttcctgagccccaacagcgaagcccatccttccttggagtcctgagtgtgctctgggtgggttttatgtttaggtgtcaggggcaatatgtgtttggagataaacactaagaaatctcctccccatgacatcacctccagccacaaggcccgagatcccaccgttagtacggcattcctttaagtgtagtaacgtcttcagcaggcctcatgagcaggtaccattcaggcagtttctcaagcacatggctgggtgatttacatagaattcttatttaacccttgcaaagaccttctgagctgattacagacccattttacagataaagaaactagagctcagaaaatttaggaaatttgtcctcagtgccttggctagcaagtgcctgcactggggtctgaattcccatggccttgctctgaatttctttctgtgacactgtgaatgcccctgtgagtagcacagtacattgctaatgacctgccatgagccaccttgcatattatttagtcacccacaggaaagccccagggttacaggcaagctccaggctctcacgggatgggagacaggagtagagagtggtcccagaatgcgaacatccccaagatgggctttatgttttctcaggtttgcctcggattcacctgtcaggacattcccttaccacattatttttgctccccccagaaacaggaggagcttactaccctgcctgtttccctctcccaggtccagtgcaatcaatgtcgtgaagatcttgcgagtcctgcgagtactcaggcccctgagggccatcaacagggccaaggggctaaaggtgagttgagggcttgggtagggagtctccagccagcccattggggagtgggagctccacagaggtgaggggtgggttggaaggagatgatggtcagaccaagtggctgccatgtggggtcccggacactggtcccactgcatgtcccggttccgtaatgaacagaatagtaacagaggcagccatcccaagtgtctgccctaagcagaatgtgccaaagggagatcccacacaaaccctgtgcccctgtggtgccaccatccctatattccttccactgtaagatgggaggttggcaggacttttgtccttgtagtcacggagagtccagtgggggcctttgcatcccattagggtccatcacttcccatgtgactttgggagcgtggctttgcccctctcagcccaattactccccgttgtggcaaacgggctgcccctgctacctcctggaaaggctcctggcatctcctgaagccacgtccctctccccgtcccttcccactgcagcatgtggttcagtgtgtgtttgtcgccatccggaccatcgggaacatcgtgattgtcaccaccctgctgcagttcatgtttgcctgcatcggggtccagctcttcaaggtaaagtctgggctccgttgtggtcctcctacctcccctcccatcagcattcctggggaagggaactggcagatatagtacaaacgagacagtgtcctgagccagacttggcttggatataacctccacctgcagcccgactcaaccttcagaccagggtagggaggcgctagaaggaggcatcgggccaccaggccagaggcccctcaccctctccacttcacctgcccttgaggtcactgcccttccttctagaaagagagagagagggactttcatcctgtggaacctctgtgtcagtcagttgcttaaagcctgcagcggtgacctattatcaacagcatcacgtccccactgcaccacccagctttcagagccctgcacctgtcaaagtcagctcctgctgcttcctgcagcacccctcgtgtcctccttggattctggtcttttttgccctcacccttttagttctgctattctcccacctagagcattcgcccccgctcccctccactgtgtaaacgcccatctaattcatccctctgagcccagctccacttctccctccctggcgagacctccccggagagtacagctcccatggacccgagctcctgtttttgcattgcagtgctacttgcagcactggcgtctgtattcgccaccgttctgtgcgtgtgagtcaggtcctgcccatctggattctgcactttttatcccactgtccctagcacagtgctgggctatggagatgctcactaattgcttttggattgactcattgattactgaacatctctgatactctgttctctgccttccagggaaagctgtacacctgttcagacagttccaagcagacagaggcggaatgcaagtgagtagaggtgggagggcagccagggccacggccggtcagccccaggaggctggaggcttgaccagaaaggagggacagctcattttctaagactgcagtggcacctgcgctctgcctgtgtgtcatctggcctcacggacacaatgtgtagcattttttgttcctgaagtttctgcccactgaagctcctcccatggctagaacggtgaagttcaagccaggcagtcccatcccacccagcattcaaggtcactggcaggccaggcgtgaaggaagatgggagatcccagagtaaactccttctcctcctctctcaggggcaactacatcacgtacaaagacggggaggttgaccaccccatcatccaaccccgcagctgggagaacagcaagtttgactttgacaatgttctggcagccatgatggccctcttcaccgtctccaccttcgaagggtggccagagtgagtatgcaaagcaaggccccacgagccctgacattcaagggccagtactgactttccagcccatccccaagttttgttaatgtcccgcactccctctggaggtcatatttacctgggtcctccccaggcagtgaggtgtatttctagaacttacagtccactgtcactgctgaaaccgactcttctttctctagaaggtgtcaagaaactcccaccaaaagtgacctttttttagccctctttccaacctcagcatgagccacgatgtcagagatctctgtcattacccttatggcatctgggagttgggtgtggggagagcttctccaggtgtgggccctgtggtcaccataggattcaagattgccactcccagcatgcccttcattgggtaaagatggctgagatgtctttgttttatttgactggatcccggtctccttagaaaaagccttgcctgtatttacagtggaaagtaggaaagggatggaagcccgggccccacttcctctgcagaggcaatgcgtttgtgcgtagagcagcccgtgggccttgcacgctgcatcacctctaccaggcagcttcccatcagatccttatatctttgtatagatacctgcttttcccccaatatgtattccagtgaaattagaatctgaaagtcagaaaattctaaatgtttctaagtcaacagcaatgcatggatcttaggtaagagtcacattattatgtggtaagatataggtgatagctggagaataaccaagtgctgtgcagggctacagaggaaggggaagagataatccctgtccatgaaaaataacaagcttcatggggcacacagcccaggctcaaatgaatggcatatgtatgtaaactgcttatgtctaaaaccaggccattggtgatgatcggagtagcatgggtcatgtgagtgtttttatctaagtggatatttgctctcggagagatttattttacattccttctaacattctctgagctcatgccagtttgcaaagctgtctcaatatttaccaatatttccagtgttttaaatcaatgtccatgactcatgttacatttaaatagctcttcacagtttcaaaacaccttcctatacattattctaactaccctgcaaggtaggaaagtcaggaattattgtctccaatttacagatgaagaatctgagtctcagagaggttaaacgctttgcccaaggtcacacagccagtaagaggccgagctgggactccagcccagagctgtctcctgcaccctgatccctgggatccctggagcagtggtgccgtccttccgcagaggggaccctgcttctccagttccctctgtgggacctgtctcctcctgcaggctgctgtaccgctccatcgactcccacacggaagacaagggccccatctacaactaccgtgtggagatctccatcttcttcatcatctacatcatcatcatcgccttcttcatgatgaacatcttcgtgggcttcgtcatcgtcacctttcaggagcagggggagcaggagtacaagaactgtgagctggacaagaaccaggtagcttcctaggaaggagcggagggaagcggggcccacggagggaatggcagcctgcggcccaccccgcagaggggctgcgacagggagaggccgtgcagatactgagatcgtctctctattcctcaaccagagtgggctgtcagtctttttgagggacctgtgcaaaagaaatgcaaattcctgcaaaccccagatctggcaaatgtactcagccaacaaatatctatgaagcttctacttaaggatactctatgataggttttgtcaaatctcatgccctatatagaagttaacaagttagagggacccaagtgggtcggcaccatgatacggaggagagaaactagaactgtgagggagtgagggcttttggggtggggaacagaacggcttcaggaaaccactcttacatggtttcttaagtaaaacccagaggcttgtgtgggaggtgggggcaggaaagaggcttaagtgggagtgagatggtgatgccaagtatcgtgacaggttctgttagccgtgaagagctggcagtgccgtggctgagtcaggaagctgtcgtggtgggaggtagatgtagtgcctcaggtctgttccctagctcggctcccactgggaggagtccgtggggaaacacatccctgtctgtgaataaggagtgcccacgggcaggagcgcagcgtggtgtgctccttgtgaccctcgccaggccagccagtcccctgtgggttttcaagtctacatctcaggcatagactcactctgctggctgctgtgtggaccctggattgaaagaagacaggaaagagaggaggccagttagaaagtggaaatgagagaggattagaccccgatctagtatccggttaatgatggtagcgatggaaagaataggaggaggtaaaagcgttaagactcaggcgttggacaccggggctgagggtttgagaagaagctggggacattccccagttcctgatctggaagcctgggcaaagtacagagaaatggactggctctttgccagagtcccaagaatctagttagcccagaatctccttccctctcagtgaactgtgtttttccatcttatggacactggcaaataagaaagattgatttagttggccaggcacagtggctcatgcctgtaatcccagcactttgggaggccaaggtgggcggatcacttgaggccaggagtttgagaccagcctggccaacatggtgaaaccccgtctctactaaaaatacaaaaaattagctgggcgttgtggcgtgtgcctgtaatcacagctacttgggaggctgaggcaggagaatcgcttgagcccaggagatggaggttgcagtgagccaagatcacaccactgcactccagcctgctggatttaggacaggaaagaaaaactgaggagagaagtacccaaggagggtctgtggcatgggaagtaatcagtgagaagcacagctgtcagtcggtcaggaagcacattcttagcgatgccgactccctgccgaggcacatgccaggcatcaccagggtgaggaaaggaggtgtatggtccctgcctaggaccttgttacggggatttgacaagaaggggctctctccttgattaagggggccatggaaaaatcaagacattttccaaataacacctcccacctgtaagtgagccggagcggccaatgatttctcagacttccggagaaccccaccccacagtgtgtggtctcatcacatcccacacttctctgccagctccccccacaccctccagttaactaaccccactctccccatcctccaccaccctcccagcgacagtgcgtggaatacgccctcaaggcccggcccctgcggaggtacatccccaagaaccagcaccagtacaaagtgtggtacgtggtcaactccacctacttcgagtacctgatgttcgtcctcatcctgctcaacaccatctgcctggccatgcaggtcagtcccaggaggagcacagccatggtgctgcagaagggagtgtgccatggggatggaaagtgtaacggagcggcaggcagctcagtgcatcgctttcctggtcaccaagggaggcatttggagaaagacgagtgttctctgtcaaggatgtgctcctctctgggccttacggaagaatccatggcaccctgggttgatcaatggagagaggggaggagatggagaagggagggttgagctgaatgcattcattgttggttgatcaatggagagaggggaggagatggagaacggagggatgagctggatgtgttcgttgttggttgatcaatggagagaggggaggagatggaggagggagggatgagctggatgcattccttgttggttgatcaatggagagaggggaggagatggagaagggagggatgagctggatgcgttcgtttttggttgatcaatggggagaggggaggagatggagaagggagggatgagctggatgcattccttgttggttgatcaatggagagaggggaggagatggagaagggagggatgagctggatgcgttcatttttggttgatcaatggagagaggggaggagatggagaacggagggatgagctggatgtgttcgttgttggttgatcaatggagaggggaggagatggaggagggagggatgagctggatgcattccttgttggttgatcaatggggagaggggaggagatggagaagggaggggaggagatggagaagggagggatgagctggatgcattcattgttggttgataagtggggagaggggaggagatggagaagggagggatgagctggacgcattcgttgtcggtaaggtgtggcgtgtggagggaggtgggttctgcatccacctgtcttcagggacagagcttgttcccaagctctcttgagtgccagagtctccataaagttgtcacggccaaccagggaaatgaacacagatgtgttcagagatggcagagcagggaagatcttggaggttctcctgagtcctcctgactgcccacggagaggtgggcggccctctgggggtttggttcaaggaaggtcttgctgaggcgagggccttcgagaaggctgggcaaaaggtggggaggaggagcgacctccctgccccgtgttcacagctcctcccctctcctgatgcagcactacggccagagctgcctgttcaaaatcgccatgaacatcctcaacatgctcttcactggcctcttcaccgtggagatgatcctgaagctcattgccttcaaacccaaggtaggcctctgagaaagacctttgattcccaggcatcaggggtggacagaacggggaggtggggtgcaggtattgaaggcagaatgaggggaagagggaaaaaggcatcggtgaaggaccatccctgctccgatggtcagtgccccaactcctacacctgcccagagctgaaccaggccaactccaggaaacactctcagctctcagtgttgaccctggctggcatgcacaagctgcagattcctcgctgagctgaacctctgagcctctcctaggagaggcaggtgatggtctttctcctatgtcccatcctctagtacataacctgttaatagaagaaactatgctcatagactggcagaccaaacctctccaggcccagccccccagatccactcaggcctctgttccaccctcctcccatttcatcagccacacagaccaacctcatataaaacattcagccagggctggatttgctcagggctcaggactgagggctccagcccatgggcactcctgttccctgcctaagaggctatggcattgctccttacatgctctggggcaggaagaacaattaccagcaaatttctctgctttgttccttgtgtaagggcaagaagattaggcctgctgctgaatgaggcagggtcagaattcctgttctttggatcatctgtgcccttcctagccagtcacccccattgtcctcagtggtggaggagcagacactggtatgagccacaccttccaccctgggcctctgtagatgggtcagaatcacgggtatccactggccgggattcaccaccaggacagctgcttctgagggaggctataagagcaactgagcagcccccaggctaccataacaccttttggagaaggatgagaaggaacgagttctaggagcatcatgcagttacagacttgagacaatctctccagcttactgagccttcccctccctcctttggtagttttcccagaggcaacacagatcaacaggaggccaagagcaagaatccctggccatatcttctattttcattcaagtttttactggtctcaagattaattgggggtgggggagggtccagctcggcctttgaatccatgttcattgaggagatatccacagccttctttgaatgaatattcactcacactttggattccatatcatgtgctacatgtatatcatcgcacgtcattctcaaaacgtccctttaaagtaggtattagcatccctctgtggagaagggggaagggaggctcaaacaattaagtgcccaggattaattgatccactgctaagaactggcagaacggagactggaatccggcacctctgacttcactgtattttccaccacactgaggttaactatcattttcccatgtcaagtgttctgcgggtattttttagcaagagggaaacaaccttggagggacttaaaagataagacaatattcctacaatgcagattcttctgtcactcaaagaatgcctggggatcccagctgattttcatagaggaagtctcctaagggacatcctttggtgatagaacggtggtttcctgccttctccagagaagcaagtacactctttttcaccttcctgtacaagtcccatttaggaggacagatcttgtcctgacctagagaggacccctgcgttgccctgacaccttccttagggtacacggtgtctgtgcccacacatggtcctattccaagccctgcagcccaggagctctgacagttcgccacccacagcagcatgaccagctgaggccaggagtgcagtcactgcctagccgagcctcagtctcggatgactcctctcagtggggaaactggcatcattttcatacagtgtcacgagacatatggtttaaatatttcaaagccttgagtcattccacagttgactcagatgtgtttctgacgatgtctgaggcagtctggagagcctgcagtggactttctgaatcatgcctcctgagcacgggagacatacagacaaccttccctgggaagtgcatgaaattgacacctgcaggagcctccgtcctccgtctaaaagacactccacctaaatcctgccaatcaaggaacaagccagtttcctaggaagtaaccattgcgagtggtctaaactgtaaagtgcctcctaatttcctctgtccctggttttctattgtgagaagatggggcaagataacagagacttttacccaagaaggaagacagccatcctgggcccatttgcatttcacattccagggtacatctatggtgtaaagagaaaggaaaatggatctttccctgtgaatttccctaaaggggctctggcaagagggggataaaggtcaccacccagttaggagcatcatggagcacagctgagtccctggattcttactgagctatgttcttcattcacaaatagactccaggtaaagcagctccaaaattttcaggcagaaaaccaaactggaaaaacttgaagctctggaagaatatccagctggatctggcccaagaaccagtggcttctaaccatgacctgaatccatgacaactttcatttcccaccattaagtaggactctgtgctgcactttttatttcactggcatggttgtttgtgtatgacccagatgagcatcagcatttgctgtgaaaggatggctaggaaccaaggatgttgaagacagtctgaagttgtcactgcttatgtttcgtctctgcaactggctggttggttggtccatcagccggtcaacttgtattcttgcttcattctttcattgttttcatggtcatggatgttcccaatttcttcatttctgtgtgttctcctcaccactccatggaaaataaatttactcaagtaagtccctgccttaaatctaaccatcccactccttaaattcatactctgttcaaaaaaaaaaaaaaaatcacacaaagaaactaggaatcaacataaaccagtttagattgagtcggtccctgacaaagcctcaggaacctgcaggcatggtttgaagagagtgaggtggatcatgccagcattgatttgaacagtgaacagtgacccagaaggatctccttccctagaagtgagaggccatgacctggagataactggatggcccctgcaccccacacgaaggtgcaggaccaggctgggcagcacgaaaagtgctggctggaatattctgaaggtaattaaataactggatagtcctatcatgaactgaagcttgtcagcaaagacaggaaaataaattttgaagatactcttatagatttgataaactgaaaaatatgcaatgcctggggaaaaagtctaacagaaatggctaagatctctacagagaaaatgataaaattgaaaggaattcaagaaaagctgataactgaagacatctatcatgttcctgaattggaaagctcaatattattaggatatcatttctcctcaaactgatccataggctcaataccattccagttaaaactcccaattgcactttgctggaggtgaggatggcaggagagggagccacacgtaaatcctttacggccaacaggatgaggctgggtggtcctgaggcttcagccccttcgggcagctctgaggtcaccaaggagggaatgcacaggagcctggcgcgggaagcagtgtctgtctcagctactccagtgtcggctgctggtttggtagtgggagtgatgatgtcacttagttgcctgaggtttgctgtcgaggatgtctcagcaagggtactgggggggaggagctgcaggaggcgatgagtgagaggctgcgctccaagcttctcctcctcagtggaatgtggtatgccaggaaggcaggggttcaccccgtggaaggctcctaactcctcccctccacacaggctccacctgggccgcagaggggtgaagcagctgagactcacctctgcccctcagctgaagccatcccactcagggagtagccagtgatcacctccccaagaggaggacgctggaagggccttgaccctggcagctctctggaatccaagtctcggtctccctttttggctttcccccagcctgagaatggtccagaggggagaatggacccagagtgaaagcactcattggcccctctgaccccctgctttcttgaataagcagctgaaacctcgggaggcctggcccctttcccacacgttcccagtctccgctctctttctgtctgggcctcctcagcccagctgctccagcttcacaaagccagatggtttctctcatccccctaccctttcttctggtgattttcagccagaagttgacgcatatatagtggagcccctcttgactgggttagacagtctctcgccctggccgagtgagtttctcccactgtcagttgccccagccctccctggccttccccagccagtggcagctgcaagcacccagccctttccctgcagactctttcccacccagtcctgagctggccctaagaaggcagcaagcgcaggtgaggtctggagttagtcgctgctgcgagcccccatagggcgtgtcccgtgagccatggggcacccagacactcttttccacagtcgattggacttctgtctagacttccccatcagcattttattgccctagtgacagaaatctaacagccgtgagcccctctgggttcttagctgaccccctctggggtgcagagccttgtccagctgctggccagacttgccgcctcatggcctccatgccacttccgaagtggaggcagcctcctcaccacggctcctctccagacttcctgccggcgcccttgccctgcacgctggtctctgctgggcccgacaggccttaccacagccatctggggctgtggctcctgtctgccaccacacacaaaggacgtggctggcattttcagaggatcagctaagaatggggcagcagttcagttgccacagtcttgtctgctttgaagcccctgttatctttcaggaaagaggaaatgaaggcagtgaagccttggccttgtctgcttctcagagagtagagaggcagaaagaggagcggtttctccggtcccccacctgttgtcctgaggaatccatcaacgaggccctgggcacttcctttatcgagagtgagggatgagtcaggactagtcggtagcctggtgaatgagatgctaccagaaccagagctgctcgggaccctggaggtcaaatgctggctctctcttggggccactcttcatagcacagctctgggcccagccttgccccggtctcactgacacatatgccagctaagctatagggagggccagggggctctggaatggtcgtcctagtggcgagcacctggagttcgtgtgccaaaaccagcccactctgcatcgtgaaggctctgagctgacagaggctgttgctggccttggactttccacactcaggggcagccgtcctcgtatccagtgtgcccatgtgggggcagggatcctgtggcttccagagcagtcttttctctgcaggctctgctgttcttaggactggtttctgctcttacaaatgattcttggccctgacatgggtggccacaggccctgcggaggggagaaatctttggggataccctgaggatgtggctcaaatggaagggtcatcaccagctgccttgttttcactgggcttgtgtcgaaaggcacagatgagggctgagttggggctgtaggttcgcatatggatgggcagagggaaagttggaatgaggaggtgggtgcatggggaagttcacttgcttccatagagaaacaacagcccagtttctcatctactctgtcagctctgtccatgtctagaaacttctgtcctttagatttagcatctggcctctttgggcaaatagctttcgtcacatgacccgaagatactgtggtccctcctccagccagcttggggttctccaggggcatccatgccctgtgcagatgcaaggggactttggaggctgagggtccggattgctcaggtgtggacctgctgttttaggtgttggagtctgtggcgccaggagtgagctgctcccaggaaagggaccagattctgacattcccctggcaggtggagaagttgggagggcaccctcagcagacaactcagcccccaagtcaaaggtcagatctgcttgtctgagcaagggaagagaaaccacctttacgaactgtgggccaggcctctttcccacccaggccagggtgtcagtctggatggtaatcagacatgttctctgcccccgggaggaggcaagtggacggcacaccaaagaacaggctcctgaaggttgccaatggtgacagaaacagccacaggagaagagagtgcatgagcctgtgtcagagcagcggctcatcagcctaaggagaggtgtggcaaaggccacgaggccccaaactgccccaccggtgccctggggcagccagggctgaggcagtgggaagaatgccagggccagaattcctctaaagacaccaatgtggccacctgaggggccaggggaaccctgcaagctaaatccatcaggcctgagctgagcctgccccggaggcaggagagactccgatgtccacagactcttccatggactgttgagagacatttcagaacgtgttcttaaaagctcagtcaaggaccaggagaaggaaggggaagtgggatggccaggaggaaaggatgcacactggagcccgttcctctttttgaaagcggagaatcttctaggaacttggtttgtttttcagtcatgttttcggcagcaatgacattgctggctgaaatgtactttctctccaacttgacctctgcctccacctgcaccgctcaccaggaatcatcctcttccaactgttttaaattagccatgcacttctgtatgatgcagtaatttttgtgaagttttaatttttacaaagcaaattttgctttatgtcttcgcttcatcatccactgaccccagatcccacccagagaggaaattctggtagattgagacccaggaagcctagatcccacctcagcatcaccttgaaccagccagggctgagcagacgggacaggaagagcttcctacaagcacttgttccttccatgtctgtttctctgtaaagtaggaagactgccttagcatactgtggtgagactgagtgaggtcatatctacagaggaatgaaggcttcagggaaagtgccattcagatgaaactcagccggatccctacgcctggggagtttgcgcccagccctctaactcagcaccaaaggaacttcacctccagcctgggtgtgccctcttgtctgtgaccattttaaatgggcccttttgcaatattggtattctgtcgtctttcatcctgagcccatgtattctatcccttcagtctgatttctgtctcacaccatgaaataactttaaggctcatcttaatgcatccttgaagttgggttgtgcaagcatcaacgacgctaccagcatctaaactatcactcccctttcctgtggctaatgcaacccattagtcggcttttcaagccttcagctcagtttttcaccattccctctctttctcggtgcctaggccttgccattcttcgtattctttatttcaagaactctttgtttgtgtgacttgcttagtgttttgctgcaggctaaagttcaccaacaacccccaaaatattttgttgagcagctcacgtgctaggcggtaggcttggtaccagggactcaatcatgaatacaagcaggtaggtaaggccacacttgcctggggcgactttggcccactcttgagacttgtagcatccccagttcaccctctcatttgtcactaggaaaactcctgtcagctggcattcatatttcaacttaaaagaagcagtcgataatcaatgcctacacctgagatcaagtaacatttagaagcactggagggaagcaaacaacatatattgtcaatgaagaaccagacatgaagctggatattttacttgccttatctcattcaatccataagacgaatattatggcctcccattttacatctgaagaaactggaggtcagaaaaaggctaagtccagagctggctttttgttgttattgtcagtttgtaacaaacaccatcctgcttagtatgcaccctaatactgctctaagcaccttaataggaatgcatttaatcattgtaaaaatcctgggattctattgcaggcttaggtgactcaaaagccactctttccacgacaaccctattaaaacaagaaatgtgaataagccatgttgttgctatgcgcttagtgagtcctcagtaaatgttagctgtcttccttctaagatccgagacagaaagaaagaaagccattctcgagtcaccaccctctggaatggaaagtgttcactccactcctgtgtcctgccaccttctctgaggccccttgccgtccttccctctcattcagccattctgtctgtggcccctgcattccctagattgctttggacctttgaattttgtttccaaatctgagttgacaagcactttcaggagaggggtagtcagctgacaggtgggctcaggaaagtgaaaccgaagcctactacacactcatctgcatgtgtttccacacacacatgcacacacatttgcaatgggaagacttacacattggggacacaaaaattgccaaattcatcaatggcgggagctgtttcatgttcatctctgtgccatgagaggcattcagtgaaagtttgatgcatgcatgcatgaatggatgaatgagaattgtgagcccggaaaagaaagtcggaatattagtgtcagaaaggattgagaccattgagcttccatcagtgcagaaatctctacacagtcctactttctgccatacaagtctccttgtttctagaggtagctctgttggaaatccttctttatactgaattaaaatgcacccctctgtaacttccacttatccgtacttccttttccatcttttctttctataagtagttcttgagcgcctcagtgatgatgttgaagcatggtaccatctttatagggctcacagagtagtgcgggagacaccaatacacaacaaacaaaggtttcagatggggtaagggctggggtggggaaactaaagagtgtgagtgaagaggcacctgtttaaaataaggaggtcaggaaggcaccatttctgctgagccctggagggtgaaaaggagccagaagaggagcatttcaggcagaaggaagagcaaagaccccgaggcaggggcaagctcagctcgctctggaaactgagagtggcgcgtgaaaaggactgtgccagagcgcacaggcccttcaggatcacggtgaggggtgtgcacttcctctgactgtccttggaaaccgcagggatgggccattcagtggggaggattatataatctgattttcattttttaaccagcatgctggctgctcattgacaaatgactggtgtggtgagatggggagcagcaaggagcctgatgctgggaaggcaggtggcagtggaagagatggagcgaggggggcagagtcatgacatcactggatggcgaattggatgtgagggtgaggaacaggaatcagagacggctccggggttcctggctttccctgagtggatggaagagtggtgtcatttgctgaaatagagaagaacaggaagaaaccagtttaaagtgagaatgtggggatatattaggttagaaaatgtcacgtaggctgtgaaaatctggaattcagacaggcgatctgggctggagatgtattttaggagtcagcgccatctattccctctgaagatagaaactccaagaatcctgtccagaagccttcaagtcctgggagaagagttggagaacatgcagaatcacaaggaaactgggagagaagagaggaaggagaaggaaaggggtctggaggccaagagccaggaaggctgaaatgaggggtggagaagaaaatatcattccccaggataagagtagggatgagttaagccagctgcggagaagaaagaaacggtcctccaggccttctagaaactgaggacaggcagagggaggccagaatgctgccctgctgtccagagggtgacatgaaaagggccggacagaggccagtgtgtgcaggcccttcaggaccacagtgaggagtgtggacttcctctgactgtccttggaaaccacagggatgggtcattcagtgggggaactgcataatctgatctggggtcttcagtgtgcacctttaccctcacccacgtcctcccatactgagcatcacagaggtccctgactctgcccctccttctcccatactagaaatccttgccctggaggagctcaaaagccaggccttcccagaccttgctggacatgtttgcgacagaaccagggccctttccttttcccagctgtgcagaattgaatttgcagtcctcatgattccataaaaggagtttccaagacagaccttctgcacttctctttggctaagaggttctttgctataaaaaacacaggataatgggggagtgtaccccgcccccagcccaatgctgaagctagggacaggcgttctcatacagctctcttctttccttcacaatctttcctctctcctcgctctgcccaccacccaccacctcacctgtgttccgcccctacaatggtcagggcagcctgaggctcataagtctggccggctcagttttccatctcctggtggccttctgtggggcctcaggacagatcttcagggccagtggctgttctcagcctcgtggggataaccctgaccacagcaagaaatgccctgctcttggagtcacttttgaggaagacgttttcatctctatgtagtctttcgatgtacagggaaatgccttaaaatcttttgcaggagcccaggccttcgtcgttcactgctctgtgttcagccctgctctttgggaaggtattcaagaacagtctaagatgttgcctgaagaaaaaaaagtggcagtctagtgggacaagggtttaggatttgggatgaaaggaaagtggctgtgattgggtcacgttcaaacatcgagactgttggttcctgcctggcattctccctcccatccctcccctgccgtagcctctctgggtccctgcagaagcttcgctgttcctcgtggttctgcttggtcctgagtgcccccacgagcctctccatggttccccattgtccacagaggaagctgctctggccggccccgtcctccagcccttgtctccttttcagagccacccatgctctcaccttttccgtgtaataaataataaacacctctagtgctgcatccttcaagctgcctcccgagatcagcctggctagaagtggtctccaccacctctgagcttccagagcacccttttccctcttttctggtacttaatcagagctcttgatggaaatgtctcatccttccagcaggactggaaagtctttgagcaggactgtctcttggtggcatccacactgacctccttccaaatgctagcccaggaatgccgtgtgcctgtcatctctgtcagtgtcagctgaatgaaggccaacggaagacaagacaggcagcttcctctggggtgcccctcctcgcaaaagtgactccagcccctggctcacaagctccggcatccagcaaggacacccccttcagttctccacccaccacaggagcttgtcactctctggggtggtctgccggaagagaaagcagagatggaaggcaaagacagtggctccggagccgccatccgtgccgtgctcagcaggacttagcagcatggccacccaggtcagggaaattctggctcaagtgtgctcagacagttcagtgcagaactcagggccagtgagaggtgctgggccctgagactacctcaggccaaagttctgaaattcaaccctcccaggctcattggaggatggggtccttgtttgggggtttgttttgtgtcattggttttttgtaacgccgatgaacacttccacagacctagtgttctacagaacacagttctggaaatctgtagggcgtcaccatgattcggggaggtaaaactgacatttagtgtttagcgggtgggactgaggatgctgaaagtcccacaacgtgtgagagggttctgcccagtgaaggagcatccttgggccctgtggaatgtttgggaaatacttatccaaggagcacccttcatgggtgatgttcagtgacactgatagtgggggagtcttcagtggctggccaggggccgaggctcagcaaggataacactgccactagaaatatgaccgtatcttggattgtatgactgcatttcctcactaacctggaatattcacattgaagaacttgaagagcaagcaagaattttatttcaaaaatcgtacggaaacctagacattctcttgggctaggtcttcaatcctttctggacccagtgctcttctttttggaatagtctccgcacccactgtatactccatgtccctacagagctccacagcgccccgtggtggccagtgtcaccccctctctaagaacccacacatagcctcaggctggctgactcagcgtcttagtgacttttagatgaaacctgtttatccaatctattgagaaactgcagtgtctgccaccgtccacagaaatccctaggtagagaaatgcattaaaaggagtagaaaagggaccgggaaagaagggcagcagctgcggatgaaatgcggcaactcttgccccagccttcgccatcggcacagaattcagaggccaaagctgtgtgggccaagctcccgcattcccctgattattatttatttgcagagtgcccacggggcaccgggtgccacgcagtgctccttagacaggcaggccccagctttgccaggaggaccttcccccgctccccccgccccccatggctctgcactcagggatttgcattttgttacaacactgtgacaggtttctttccggccttgtgctggagagcttaaaagtcactatgaagcataaaaaataattatatgacttgcataaagccttcatgtgggaaggctagtattagctattacatttaattatttaatgtagaaaattattcacacggtgtaaaaaagcccggtgggaaagtacactgtggtttccgtctctggccctgccacagggaaggaaactggaacacaccggtctggtaggaagaagagggattcccagacctacagggtgcgtcggcgataacccgacccaccaaagcccgaggtgctgccagtgcttccggccctgcgctgggtcagcctgccttaggggcaggaaggaccttctgtgacacaggctgcgggcagtacaggaaggtagcctctcagcaagaaccccaccaacaacagcaatagtagcaactgtagcaatcagtgagcacgttctcggtgccagacagggcaggtgtgaacttatatcattctcacaaagccctataaggggccaggcacagtggctcacacctgtaatcccagcactttaggaggccgaggccaaagggccgtttgagcccaggagttcaagaccaccctgggcaagaccccatctctaaaaaaaaaaaaaaaaaattctatttttaaattagacagatatagtggcacacacctgtagtcccagctccttgggaggctgagacgagaggatctcttgtgcccaggagatggaggctgcaatgaaatattattgcaacactgcactccagcctggatgacagagttaaaccctgtctctaaaaataaaataaaataaaaaccctacaagggcaagtactctggttattcccatgttgcaggtagggaagctgaggcacagagaagttaggtaacctgcctgcacaacccgaggctcattgtgggaagtgaaggcggtctatcattttattcacatcttgttcaagagtgtgggtgcaggttgccggccagatgccctggccatgcctggagctgggcatggctccctcccccacagccacctctgcccagcgccctgcctggcgtacctgtgctctctccaggagcactcgcccactaggttagagagggcacaaggcaggagtgacaggatgggctgtgggagctttctgagagtgctgagcaggaagggacctctctgtttggggtttggaaagctctctccatggccttggtcctgtggattggactggaaggggttctaggcaggcaggcggttttgaaggctgccacagattcaagccctcccatagcaaaggagagattgctcctccttgttccagccacatctgatgctgcttgtttcctgccttcccttcttcagagtgcatggtgctgttcatttgagcttaaagttgcctgtgtgcatggccatgtgtctgcctagccttatccctctccaaggaggcattgattcagcaccctagtcctggaggcacctttgcagaaaacggctcatttattccagcatgagtagtgtgaagcagctattgggatcccccaatctacccaggtacaaactgaggcagaaaaagagcctcctgagacccccaaatggagcttaacccataaccccaaattttcatctgctctcagtggggaagatggcaggcttcaggagggctgattcatattcgtatgcccaagccttgcatagttacaggcctctagtaagtgcttattatgtgttgatgagataaataaatgaatgagtaaataaatggacgaaggccttcaaaaatgtcctggggaggataagccttaattccaaagaaaaatgggagcagaaagtgtccagttaaaagtgtgcattctaaggagtgtgtgttcctcctgcaactaggagagcagcccccctcgcctccacccgcctggggtcctctcacgaggcaagcacccagccccctgcccactcctgccctttgtccaagcagtcctcaagctagctgtgcagcgtgtgtcttggggtgcttctgaattaacacatcacaggatgggagctgacagaggagggcagaaatccccacctcctcccaggctgctggcagctgtgtgctccagttatgccttctccattaggtgccactaatttccatgattactgttatgtctaaatggcatcctggtgtaatacaatttatattatctctgcttggtgtcggttaccattgttttcatgatattcaatgggatcaactctgcatagacacacagacacgcactgagacttcaccaccaccgccgccagctgccagtgggacccagctcctctccccggttcattcggctctcatcatttctgggacccagaaaagatcagtgtttccaggagctgggcacagctccctcccccacagccacctctgcccagcgccctgcctggcgcacctgtgctctctccagtgcttgctcactcaagcaggacctctgctctcttgcagggacccccttccctaggtccggtgaagccatctgttgcccctccctccctcagcgccaccccaccgtggcagcctccagctgcttcctgactgatgttcctacccctgtctccaagggcccttcagaggacccgttgtccttttccactctctgtctcaatctcagcagccccacttctaatccagccccgaagtcctgcagcccctccagccagcacgctccgtgacccatgtgtcctaggaggggaaaccacgtgttcagagtcagcttccccacagggccggggaactcaggagctggctgcctcccctgtgtttcttggggcagataaggaaggcaggcaggaaggaacagagaagagaaagaaatgagtcatggcagtgacagcacctctgccctccaaatgcctaagactgacagcaccaccccaggcaaggagtgaaaggtgtgcggacttcgtcgtggacgccttcttgccaccagcctgactgaaagctggtgcggcctctgctctgggcagagaaggagcgaaggactcggaattgaagggcaaaggcatgcacccgtcaccccttccacagcagtcccctcgcagctctcctgtaacagacagaaaatgggcccctgccaccacccctctcgataaaagaagagtggcttctaagaacctagcagttaactgtctacatgaactcgagtcttacaaaatgcagccgtgacaacctgcaccctgtcgccaatcccaaacagcgtcagccagatttcattcaggagagtttgaatactagtgacctggaggatgggcagaaaagacctgagagacagactaaaggagaactcaagattccagaaccttcagcttcctccttcctcctttcacacacctaggctttgtttccctgctgttcagtcccacacccaaaatagaacctgtgactcctacgtcactaggcagagcaacgctggtaaataatgacagtggctgaccgggcgcagtggctcacacctgtaatcctaacactttgcagggcggagacaggaggatcacttgagaccaggagttccagaccagcctgggcaacatagcaagacctcatctctacaaaaaaaaattaaacaattagaggggcgtagtacttgggaggctgaggagcttgagaccacagtgagctatgatcacaccactgcactccagctggggcaacagagagagaccctgtctttaaagtgaacattttttttaaaggtagaaattcagagattttggtcatcatcctctgtctggaacattcacacatccagaacacctattcctgaggaggccggatagagtcggtataaagaataggcatctcttggatttttttaaaatacttccctaggtattggtcctcacattaaccctatgcaagacataggactggtgcttgtatggataataatcagattatgattacctcccctcagaaagctcaatctccagccgactagaataaagacaacggtgatgacgagattcttgaaattgcacttgaaggtgtaatgaggtggaagcctctggactctggttgctttttgttttaagcgattgcacacagagggcttgggaagtgttcctccagttggcaggaggcccatgatttcttacataggtagtcatcccatcccttttcccactgggagatgggcatgtcttgtctccaaaaagcagaggacccgggaggtaggcattttacagccaggaagtaccactggaccatggccccacagttaagacacagtatctgggaccagaagaaagcaataaaagatcaggacacatgtgccttgtggatgggagcagaagaaatggcaagttctgagtgctttggatgcatggtctcctttcaccctcacctcaactctgtgctttatcccatgttctaggtgtggaaacagtggtatagggaagttaagttatttgttcaaggctacccagctagtcagtggcagaggtagtgtctgaatccagatctgcctccagagatcaagcttttcaccagtatgctgcctctttcaacttggtatatctccaacgatggagccaaatcagggcatggacaaccaaaatggaagaaaatccacaattctcgtgcatgtgaaatgcatcctatgatgcttttgcagcagttgttccttcccagcaatgattttctgatgtcaataacaatttggtgaccattttctcagcccacccctatcagtgagtggaggtgctctggcactcaggcctaggtactgggacctgccctgagatggccagaggagaggcccatcttatgaacacatctccagagtggggagttggaagggggaaatccactcagcctgtgggattgggggatggcgagggcaaggcttccagctgcaaaaacgctttcccttctgggcagcccgccctgcgtggctctgaggagctggacagtagaggtttggtttgccacttcaaggagagccaggaaaaccctttctccaaccccttacttctcaaccatttgggacacagtcaccagagaaataaggggcaacaggtataaccagactccaggtcagactgatttcgtaagacgtgtatgatttttttcccaccctcccttctccattacacccttaaaacccctattactaatggtttccagcaaccgagggggcgggcaaaaacagagagaagagagatgagacagcatcaagcccttccactcccgagagtgttgggaaaagtattcctcctaggacccaaccacctggggacttggggaccagcaggaaggacctgggccttgtttctgggcagggtgtggtccaagtgggaggaaggggctgttgaaatagtgggaggaggggacaaaggggcaatggggatggaggcctgaaagctggccctgaaattgtcttcatggtccagctggaggactgaggggctctgggcaccaaaggcaggacggtgggaggatgggtcagggtgaagagctgcctcttaaagggaccctgtttgtgcccagacatgtaccctcacccactgcattccagctctgtggaaatcccccagggctggggcacaggagctctcagcgacaaggaacctggttggtttctgcagctcccaggtagtgtgccaccaaacagatgtcagtctaaagcctggagtagcacagcctgctgaggacaagtgtgaggcacaaggccttaactccaacagagcccagccagtgccaatccagtgagagccagcgtggagccatgggaggagggggctcccatggtcaagaaagagggggctgtgccttctgtctgcacatatacaaagaaatctgggagaaagggtgaccaggggtgcacagccaggcggttaacagggttcctttaggtctcagcccttcaccctggtgtgcccgctgattaactgtgtgtgtttctctggttttcaacaccaaacctttgctctgttctgtccatttcttccttttcctttctccatcttagaggtgttgcagaccaaggccaacttacccattttgtttcaggtctctctggtggatgaagattccaactcatcctcctttcttgagcactgacactcacaccttcctctctctcctcctcctcccacaccgaaataatgttttcttgcacgctttctaggctgatgcagagaattcctggattctgctcttgttcttgtttgtctcccttctcttccttgacttccctgcccttcccttctgaaatagctctaccccacaaagacagtattcatatcgagagggtcacccagtgttttccaaaatctaattttaagtcttatgcatagctgtagttcatctggggtcttcacttcttatttccctctccccaaaatcactattctccttttgccctgtgaatgatatctgagaacctgagagcgaattggttatttcctgctcatagcatgtgacttaaatgggagaaagaagtctctctgcctcataggctccactatattcagaaaaataccctgggaagccaacaagaaagccctgatttgaagctgaccctcacctcacccacgccctggtcagctaatctctgcttcacccatcctggctgtccagtctccggggtggcgtttctgttttctttcggcagaaatgcctgggaaccgaaaggcccctttccctgtgacctgacctcccacgctaagaataacagccccaggacagcatgtctttcggtccctctggaaagagggcatggctgggaagtgggaagttaagggagctggatagagctgggaggaaagggaagaacacagattcttggctttgtgagtaaaaaatgaagaggaaaagttggcagccttcaagtgagctggggagagatctggggaacctctcggaggacgcttcatgctttcataccccactccgacctcagaattccacctcctggaagcccagagggcaggcaaatactggtcccactgaaaaaatgtggccagccctgtcttgtccccttcgcagaccatttctaaactaaaggcgtgaatgttttttcttaaagaagacaaatctctgtagtactcggtccttccccctccacccatggggaatatgaccgcctgtagctgggggtgtatggggactatgaccgcctgtagctgggggtgtatggggaatatgatcgcctgtagctgggggtgtatgcacccattcagtcacagaacatcgctgtgcaggcccctacacctcctacacccaagaaatccatctgctaaagagtccactcatccaggacacctggggtcctatagggcctctgggacagcccattccttggttgacctgttgtccaagtacatgaaaaaagtcttttaagaacattcgtcccttctcttctccaaacatggtgaaaaataaacaaaatccatagctacagaatcaagtggtaaagtcaggatactggtcttccccttctgtgccagaatctctccttcagggcaccactgtcttcatccccttctaggcagccagcctcccccaacctaccagcctatccctagcaaacccatcctcaggaaacgctttgatcaccgcgtgccctctgcgcggcgtctgcattcagcaggaccctacctccaaatgaccatgaaagaacctggggaggggcttagaaagcctcagaaagccctgtcaagagccacataacacactcccggagtaggagcccagccttgcctctgtctcctttcccttaggaaagtctttgccagggttggaactgcccctggaaacactggggcacccagtgcaggaactagggtaccctgatttgatctgcaagagttgcacttattatggatcttgttttaacaatttggtccttcttttatttttgagctttatatgagtcaccagtgagcccagataacctgccaccctgcggcccacattgatggctgtggttttcaaagcctttttcattcccagcttcacccataggaccgagcccgctaccctctgaggggtcacacacctgtgttccctccctccagacaggcccttctgctggaagaggactgggggtgcaggagatgctcagcgtggactgagaagagagcatagtagccacatcctgccgcctggcgatttgcaccacccacgccccccacacccactcctgcccctggtgggacgtggacagggcctctgtggagaaggggtagggtgggtggatctgtaggatgggggccacgtgaccgagggaatgcgggcagtagggttagagtgtcgcctccctgctgctccttccttgctggtgctcctgggctcctggccatggtgagggcgtccggaactccagaggcaacacggaggtgcctggacgatgattctgatggtggtgttgctctgttcttgtctgtctaatattcctttttaatccccatcctgcctgccctcccttatgtagggttactttagtgatccctggaatgtttttgacttcctcatcgtaattggcagcataattgacgtcattctcagtgagactaatgtgagtattactctgccctccccaggaaacctcctcattcctcctcctctgcctcgtctatttctctctctctcactctctctgtttaccttcttttatgttttttttaatttcctgtttttacccgcctccagtcatgccttttattgaacctgccgtcgtcctgtgggggaaaaaaagtgggagcttctcctcctttttttccatttacctcagctctgcccggcgctgccgggctggggcgtggagctgagcagagggagtggcggtgcaggggacacaccgcccggctccccggggcggccacagccccacgccacctttgaactaacccagcttttgtcaggcctctgcaccctgcgaaaaccaggttatccaggtttgagctgccagaactgtagagtggtaagagagtgtttaatatgcccacgtaacctctttcttttctcattttttttctcttctctccctttttccatacctttttttttttttttttcatttttcctcttcccttttgttttgttttgtcctttcttgttggttcttcttctctctctccccggctgctctgccccatgcagcactatttctgtgatgcatggaatacatttgacgccttgattgttgtgggtagcattgttgatatagcaatcaccgaggtaaacgtaagtacatggcgtctgtccctaaccgtccgtgcctgctctaacactcatttgccttttcccggtttgtttccttcattttattttctctccccaccttcttattttttttttttaatttgtttgtttgaattggtttgaaggtttttttttccttgttgctttattttgaaatctttttttttttttaactttggaacgcattaggccttccccttttctgttaagttctgattgctgcatcttttctctctcccatacaatcagcctggcatgactcacactgtatcggaggaagcagctctgggagctgtggagtgagaacatgaggggatgtttgccactctgggcagctgctggggcagggacccaaacctcttctgacctccaccttctcctccagccactgccttccctactctctcctttgcatccccacagcatctcagaagggagctctctcaaagtggaacaccctgagataaggctaagactcagcctacaccgtcagccatagcccaccctcgcccaaggaccacccatgatctcgggttgaatgggctctgttttcatttaacatcagcagcccatgcaggcatccaggtccctgcaggctcatttggaagaggaacgagaaggggaggatcagtcatgtctgaactcttctctagaggtggtgggtgacgtactgagagctgctctgggtggacctttcctcctagttgctgtggaagcaggccccatgtgagcgcctcactcccacatgcacctgccacccctgccctcgacccctgacctctcacacccctgcctctggctcccgagcctcagacagcaccccagcctctgcaaggcctcctgccacctccttctcccaagaggtgcctcctcctatacagttcctaccagttcctgcacatgtcttttctgttacctggcatgtttaaatctctctttatctataggcaagccttcttgcggtctttaacatgtgttgtttaattttttcgttattatttttccttaattaagagacttggtaatgtttgcatagacttttgatgcactgaactattgaataacagcacagagcagatgctttagagttttgatctaagatgtttggaactacccagcccaccacccccagctcctccatgcacccttactcccctctccactccatcttttgctctcagtcagttacactgccgtgttatcttgcctgccagattcttccagattagagacccctgtctgctcctcttttagcagatggactatggaaagcggttgtcacacttgtcatatgtcccccgctgtagtctggtgccccaaccctgctcaccctatagctccagagaccatggcccctctgtctccctgtgtctctgagaactgtctttgtccggtgtgtgtgtatgtgtatgtgtgtatatgtgagtgcatgtctgtgtgtgtgtgagcatgtgtgcatgtgtgtatgtgtgtgagtgtatgtgtgtatgtgcactctctcttaacttctcccagtaaatcctcagatcatttttttaaaattagtcttcctactcgtgctctgagactcctctcccctttctgaatggaccccagttttgcagctggatgagccccaagttgctgttcccactcatacacataaaggccagagcttctgtgcccagagcttgtgccatgcagtgctcagccgtgggagacactgcagggagagaaacaggaaagacagggcagcagtgggctctgccctcaggaggtttcctttccagacagcagtgcagagccacattaaaatctatgcagaggggccgagagccccacagcaggaaaacgcagaaaggtgaccgcaagctgcccccctgtacagtggcccactgcagctctgggggtcctatgggttcttcctacagtcaccaaggccccatcgctcagtctgcaattttctcccaaactattcatgtctttaaagaaaaagaaaaaacaacaaaaaagcattttctaggatataaaatttatacagaaaagggggctctgttggggatagggagggggcctgaacccgtccagcagctcctgacattggaatagtggttttctatttacaagtcactttgcatttatctgacaactctaaactaccctttaaatttgacaggtaagaattctcatccccaatttgctgatgctaaaggtgatgatggagagattaagtacctttccagtgcctcagagtcagcctagccctcctggggccagctcacttcctgctaggccagaattcctggtttctgtactccacagtgccttttggtaaagagaaacctcacctgtccctcctggtgtactgccactagccacgacttactcagaacttacattctgtaattgatatcttaaataagcacagggttttttccactttctaaataagcaataatcagccaccctgagagttccgctgcccctgtgtcctcccatactgagatgctccgggctgaggcatttgtggctttgaagtcccactgaaggattgtcgggggacagggtggcaactgtgcatgtgactgacagcaagaggaggtgtcctgagacccaacacctatttcagagccactttctccctctcccacacaactgatggcttccgaaccaaaagaacaaacataacatcccccaaggcaggaaggcggtttgggagaggagaaagctggacttgaagtcagaaaactggcagattgttgagtcttgctgctgcttcctgtcaaagcgttaccaacatgcccagagactctgttttttcatctgtcagaggaatgtggtatttacagcagtgtgttttgaagctcaaataagagcatctatttaaaaactctatataaactggtaaagcactgtggaatgggaggaactgtggcacccaggcaaatgacattccttccaaagttactgctggtgtcactcggagggcctagtctccaaccaagaccttttggttagtctaattataacttacaacccacagtcgaaagccctgtttcccagatatgcttagacccatagagatggccaacaggtacaaccagatcaaagccagcacacacacacttaccacggcccataactctgggccttgaggggcctgctctgaaagcacagtccggcttgaccctgggctcacatcgcagccagtgtgagggacagcagcttaattgagcaaggtcgctccctcccactagattctgcctccagggcattagcagcgtatgggcggccccagcattttcttccaatcccatgggatccttcagaaaatcctgcatccctgggccctgctccgggccttcccaggtatttttagtcatcctctcatcacaagacatatattcccagggatatggtctatttggaaagagtctacattgttagcctcagtgtgatccatgagggcgtttcacctgtaacctgccatctttaactcctaaacccctccccagatgccttatccaccctaactttcctccaaatattccccacatttaaactcgtctcaccttttctcttttccgggctatggggccctccctctcaggaaccatcattcattcaatccacagcatttagagtctcacttcctatacgtcaggcaccgtttgaggcacctgggatccatcagctggcaaaccaaaagcccctgccttcacagatttgcattgtagaagggaataatcagacaattcacaatgcaatgaggacagaaaataaggaactcatacggtgtgttagaagatgatagacgttttaggaaaaaaagtagtgccagataagggggctccaaggtgctggggagcagtgatggcaggcattggtttaaataagatgggcttccttaaggaggtgacagttgaacaaagcaaaggcatgaaggaattgaggattctccatgtggagatcgggagaagaggtagcagggcaggaggagccaacctggctggtgcggactgagctgggaaaggagaggtgagggtagcagaggggtaactaacaggttccacttttgggcttttactctgagcaagaaggggacatactggtggctttgagcagaggtgtcacgtgacccgactggtttttaaagagaccactctggctggctgtaggagtcaagggtggaatctggaagatcatttagaaggcaaatgcagtcatccaggtggaagatgcatagcgtggagcaaagttgtggcagtagaagcggtggaaaatggccagcccgtcactctgttttgcaagcaaaattaacagtgtttcctgacagactgcatgggggcaggaggagaattgcccaggaggactgggaggtttggcctaaatcagaggaggatggagcaggtaggcaaggaggcgggctggaggcggggcctgtgtgagttaggaaatgccagagcacagttttgacgtatctgttagcccttggaggggagatgtcaggtggacacacaggtcagaggcctggggatggagtcattcacaacaagatggtacccaaagccccggcactagagaagaagaagcgacaagaggcagaggagcggagaggcctgggccagggcctctggcgcgaggagatcgggacccgcaaacttctgttcatctgggagatgccgctgaacaactgccaggtgtcacaagaggaccgtcttcaggccccctcgtgcggtcatgctgaattcagcctcagtatctgagccatgggccccggcccttctcctgccaatgcatcacctgggtctaaatccgagcttttcttcctctgtgagccggggaggtaagagtgcgatgtcctgctgctctagggaagcctcttgctcttcctcagtgcttgggtctgaaatcatattttcctgtgattgttcgtgaaagttactacagcaccagaaactgctccctaaacatcccaaactggaattaatttgactgcttgggccaacagcctttcccgacacacttctttttcattttgtattttaaaatatactgaacaatagaaagtgctgggcagcctgaattcctgcattatggacatagagaaacattcccaagttgtcaatgaagaagccttgattatgcttccagctctggtgacttagagcaatgaactccattctctgggcctcaatttccttgaatgcaaaagtgaggagtgagaggtttaggatggtctcttgcaactctagcctgcagtgattctgacttgggcattttctgacagctggaggtggatgcttcattgcccccattgccttgctgggttctgaggtggtgtttcctgtcatcaggcgcccatggtgtcatggggatgcttcctccagggaatcatctgcatagagataatccctgaagccacagtgctgaagggcagcaagggaggacaggctcccttggctttggtggagctcacctggagattctccagagaaaaggagcaggagaaagaccttcggggagcagagcaggcacagggaggggaaagaacactggccctggagcttctgggcacagctctcaggaggaattgctggaggctttgcacgatgcacaggagtgtccagagcagggaaataaagctaagcgaaggtggcactggctgtgaacatgagaagaggaccgacatgaggatgacctgatgagcacggatcaggcatcatgctgaggacaccatacacatgatcggatgaaacccgtgtgcttactctccacatgaggaaatcaaggctcagacaggacgaacatctgcccaaggccacacggtgaatgggaggcaaatcttggattcaaactcatttctgtccaagaattggctcttgcatttcacagtgcccgctggctaaatccctgggccaggctggcctgggcatcactgaagggcagggcccagtggctcctgcactcctcattcagtgcctcctggcaacgggacttggggcggagctgcctgacttgacttctctgtgtcggttgatgctgcggatgctggatccacaaagcctgggatccccctgggatgctcagacagaatgcaggctacacacccggatccgtgtctctggttacagggaacagaaggcaaacgccaggaggcgcagagcagcaccactccctttgcccagttggcatctgcatctgcagctgaagaaagagactgggaggaggggggccagaaggagcaagcagcgacaaggcagggcagagagtgtccagggatcagcatgtcgggatactggtcccaagtcttccccaccttcaggccctgaaagcctttctaccttagtatctttccaccataggcccccaggcacaacttcctataactgtcactcactactctccacaacaatcacaagcaagccgggctcctctctggctctgggtcctggaaggatggaggaaaagcagtcagtcctgagtcatagagagagctacttgctgcacgtccaccccctcaggggtgagtcagctcagcctgcacgactccagccctctctctcggcctgcaacccacagtgcttgcgttggacagtgggcctggctgtctctgtctgcctttgtggctgtaaccacgcctcctgccccctgccatggcagagaaggggccagaatgggcacaagaaaggcaaggctgagtgccccccactgcccatagctgtgatgaggaaggagggtagagagatgtggtcagaaagcagatttgtccaaggacattagggtgtacacaccttagagaccacctagcccaaacccttatttgtttattcctcaaaggtaccttgagcacccgctgtgtgatgttgcttgaggatatacaaattttctagatgaggacacaaaaggccagaggcaggaaacagcttgctcattttcacaggtttttcacagcaagctgaccggaactcccggtcagtagggggctccagtgggtgctgttgccaaccattgtctagatgacattggtgggtgtggcctgagctggttctaggacacatagattaaatcaagttccgtggtctcaggacagctgggtggggcagaggttatccttgacatctccctccagccccccttctcattgctggagcctcctgttgccctcggagtcccttccagcttcttcccactttcggcaacagcccccacccccaacaaacctaatgctaccaagatgccttgtttcaaaatgaagtgattccagcacagtcattcatgctgggtggtagcaactcagtgagctgcccttctaatagatcattgtaccttgaagagaaggcgatgctcaacctgcaggtggaatgtttattgtatctcaggtgagcctttagcaacgtgacccctgagtggggagattacttttgtgaggtccctccccatccccccacaaaggctgttttctactctgcttaagagtatggctggcccttgagagagttagcagagccaccctcattcctagaagtgggatgaagcatctgaccatcagcagtcccctgggaggaggccgaatgccccggatctcaaggtctagggcgaggcttgttgtgtgaactggtgtgatgtggggttgagggggtgcagacagagagacgggcctgagaagtggcctggtgcagcaagtcttctcaaaagcttttgccttgagaagtaccctgcaggtttgacccgaaaggtcatgggaacctgtttttttataggcatccaatttgggttgttaattcagctgtgtgagattgccgaggtcctgatgcggctctgacccatccaggctccccttgccctctgccttctgccccaaactgtgtcactttttgtttccctcaaatgctctttcctttcctgttctcatcttatcaacccacatacggccctctgttcccttcccctccgtgtaagggtgggaggaagttgcctagcacaccttttgttgtggccagacaactgattgtacctggccagtgtctgacacttcagttcctacaggctcagcaacctgctgctggggttctttccagaaagctcgtaaagcaaaggcacctagaagatgccatgagctggtagtgaggagacacaggaaggctcaaagatacgtagggtgcctcgagaagcatggccacttctgttgatgcccacttactctcatatttggtgctcccacccagggaatcatctgtttgtttcctttttgagtctctgccccgccctgcctcacccactctgtttctctgcctttcttctctatcttgtgacctctccctctggcataaggaattctttgatgtagttagtactactggcaccttgatttcattcgtttattcttcatgggctttttgttggtggaggttggttggtttgtttgaatgactagacgctgggctgtccttcccaggggaagatgaaactcccaggcaattctgtgatcagtcttgtttagtgtgtgtttctggcaggtaataacaccttgggagccatcaggctgcacatgataacagtgagaccctgaggcttcagccacttccagccagcaaactggtcactgcagccagtagcacagggcatagctctcagccatccacagcttcacacacaaagcaggaagagcaaaagagggccaggagctgcagccccacgctgggagcccggctgccagtccccttggggccaaagacccctcgaggggagttctgaaggggcatttcaactcagtgtctgtaactccaaacacacaagaaaggcaagaagggccctctccttctagctggaattccactttggagaaacacaaaagcccgtgggtttccgacctgggggtggtggcccgggacagagtcctttccatggtccctgtccatctttagctttatcctggtgcgttccctgccctttgtttgtcttcttctgctcagttcttctcctccatcacttctgtctctccactcacaccaaaccaaaatgggaattctgcttagaattgctttcaactacgcatacctcattcatttgctcttctgtctgaaagccatggcctctaccctcagcttctgtctatcccagctaacgtttgtttaaccttcgcctctcttagcaagtacctgttcattcagctttagaaggcttgcagcttaaaacatgtttgcctttggcctccttaaaatgtcttgccccgctgccatacccagtggctccaagattcagcacctcccgactcctcctgagatgtgcatttctcctggtgggaaggggagataaaaggatcgtgaggatccccccacacacacccttaacctacacctgctggctcctggccatgaagttggcgtcagatgtctccagcagcccctgacccctgccattcccagctctctctctgcaccagcctgaccacctcctcccaacctagatcacctccgaggtctctccctcaaagccccaccccttggtcttcctccacaccatgacaccccccaacagaaccagctgttgtgtcttgcaggtcaaattgagattggaggtagtacaagcggagaagcggagcatggggagggggtactggctggatggagaccttcaggtggcttggaatgaaatttatatcagatccacctccctaagttctggacaagacattttaaaaaatatagcaagggttctgtagcaggaccactatttagagactcacactcccatgacattacttttgacatctgtttcagaggtgcgtggaatcttagtgacactgaggtcatagcattgtctcaatggcagccattggaattgggcagccgttttctgtagggctaagaccagccttccctggaggagatcagaggtaatctgcacctttcaaaatcagcctgccaaggagaatgcagccatggcttatgcccccttcacaatgctctctggccacctgaccgcaggagagtattgtggaggacaactgggttgggtattccagcctagagatctactgctcagcccctgaatttctataattcttacccttggctgtgctttaaaaaaataataatttttaaaaaactttttttcgtatggtgaagagctatttttcaactaccttttaagtctccagagagaccatgtaatgtggcaaccaggaaacacatcctgcggcctcccacaccatcctggtgggaaaatcctccacctgggaggatcctgtctctgctggcctctggcattccctgagtatcgcccctcagcatcctaaatgtggcctagacctggcactccaatgaaaataagtgcatagtgagtgccttccagaaacaaagacttcatccactgaggtgttacttctcatttgaccctgaacttaattcagaaagacagctttccagagacctccctctcattagctgccctgcaccactcccctcctcactgccagttctgccaaaacaaggcaatctgcataagcatattgaaggaaggaaatcgtctttcctttctgtttgccctgagcctgttatctggaaccactaaccagagctcgctgtctctgaaaatgcccgacctctgcctcagatacggaataataacctcatttcatttatatcaattacgtgaacaaattaagttaattgccccaatatcatgaaatcattgaaaattaccagatcattagaaaacaaggatgaaagaattggctgctcagaaatttctccacgcctaccattagtggagacagtgccatatgaaaaatcagccagaatgttcaggttatgtaagcagctctgttggctgccctaaaaggggaatgcagtctccaggcttgggggtgtatgtcttcagggaatcctacggcccctttcttccccaagaaagaccacagatgggagaaactacaaactaactcagggcaccggcagcaaatctgggaaggggtcagagattaatggcccaagtattgatggctaccaacaaattctgaatttacatccaaaggtagaactgatgctttgtagtttctcaaggggctgtacttggtatttaaagagagtggcaaaccacagaaactaaaagtgctgatcctgggataccacagatgtccaactccagcaagtccaatctctccttccatctcagcaggggattcatttgccaaggcgaaagggtaccaaagactctaaggatgacgtgggatcatgtaggaaacgcccagggcatcagtagacctcgggggccttgggggcaggggctgtggcttaggctgcttcctattgttaccatgtagaaatcactcagggattgctctctgatttcatcgcgagtggttattcatttatgagaccacggaccttgtaaacagctcctcatgtggaaacaggtgtgagcggtggtagaggcaacagtgtcctagctactcaaaaatgccctgtgaacagcatggcttaaggctcaagaaaaacttaatctttgagtctctagattcttccaaagttggtctctttggagagttgtcattaccggggcaggagaatgccacacagacatctcagagcgtcctcattcttcctctttctactgtcctcatagctgctcctgactttctcttgtctgccattatagagacatgccataggaaatgttaaatcaatacatgttactaaaatacaaaatactatcaagattatctgaacagatccaaagtcaagtcttgaagtgaaatatgacttaaataaatgaggtcttaaatgggagctataaaatgcaacaagaaaaaagacagttaagacaaatgtttaaaaatcccaaatgaaggattctgaatgtttaagaagtaaaacaggttttttttggttttgttttgttttgtttttgtttttttgatgcctagaggttggttcaattaggccaggcaagccaagtacctgggtgcgttgtcagaattatctccattttggtcctgttcaggctgggattgacccagaagaccttcaagcatttgcccagggttcttagaagtgatgagcagctgtgatggttttcaggatggatccaagaggccagcaatggctcaagcttcctgggagctctgcccaacactcaggagttaacatggtgtaggttacctccctctggacctccctccctgccccactgaagcctgagaaacacagaactccttgtccatgagcaagggagctcaagcactgggccaggagcggggcagaaaggtgccagtggatagctagacctgaccatcctgggcaactatcacacaccagagcaaaaggggtttaggtgctttgccaagaaatttcttctgtgcatgcctgtatgagagagagagagagaaagagagagagagagagagagagtgtgtgtgtgcgcgtgtgtgtgtctgcctatgtttgtctctgtgttcaatctcagtctgctagccaaatcctagggaccccacaccctgcaatcacaaggactgacctggcaggtggaatcttcatgaagcagaagctgagatctagagatccagatttagagtgttctgtaaagcctagagaagtgtccctttctttctcctccctcacctcaccctatatctccaccatcccctaaaagggcatcctaccaactagctatgaaaaaaaaaagaatttgctgagaaatctgttacccaagaaatattttcaggctgcaagcaaatgtctagttgtgcacatttccatccttcaaaaattccataacacattttccttgtttgtaccttaaaaacagaaatacaagagcaaccatctgaaagtggagagtaaaagccaagtcctgactttctagaaagagttagcagctcagatggtcaagatcagtcggggctgagccctctgtgctggagcccaaaacgtaagggcaccttcccagatccaggctccaggaactcggggagagggctggccctgggatactcaccagaggccagtttcctcagctcctacccccaaatgagttcagcagtcagacccgtgagaacagcttcctggggtgttagtgtcctaaattgtgtgcagggctttcaagtttagaaaacaattcaacagtcattatttcatgccaacggtcagggctcgccgcacctatagaccaacagctaagcaaggccatctcctgcctgagcctgagctttcagaacaagccccattatggagtgggttgaggccacctctggaggccctcctcagtgttgacttgaagtcggtctcccctaaacctgagaggccactgcccttgctttgtttaaatatatgtgggcaaggataggctctggggtcagcaaggcctctgtccttcagctggccctgcctggggtaagctaaagtgcacaaagcctaagtcctcataggttaacaatggctaataaaaaacaaattaaaacaggcttggcacagtggcttacaccggtaatcccagtactttgggaggccaaggcaggaggatcgcttgaggccagcccacgagtttgagaccagcctgggcagtatagtgagaccctgtctctaaaaaaattaaaataaaaaatttaaattagccgggcatggtggcacgttcctatagtcctaactactagggaggctgatgtgggaggatcatttgagcccaggagttcaaggctgcagtgagctgtgattatgccactgcactccagcctgggcaacagagctgagaccctgtctctaaaaccaaaccaaacaaaaaaattataaacctccatccacaaaatcccaaagacctcatctgcttatctaataatattatgaatgtgagttatttaaagggcataggtaggagaatgcctgtgggtccttgattgacatgagacccagcaacacagaccccacactcatggggacgccccaggacctgccaggcctacgctttcacgtttctttcacttgtttccttttgccctcttctgccactgtgttgctcccgtgtcagccaagacctagaataccgggcatcttcatgggagactcattacagcttatctctatctgcctttctttaaagccagctgaacatacccaatgctctccctctatggtaagaccaaccctcccgaccatgctcccggcttccgtgtccccctctaacacccccactctccccaccccgaactccagagtccctgggagccctgcctggctctcactgcatgtggccactgtgtctgccgtgtgccttgcctgcctgttcccttctcgtgtgagctgtgaagatgctgtttgtgcagtggtggtgttttacccctgagctttccttggggtggtaattcactgtgatcttgactatctaacaagccactgggagagaatgggacccgaggtccatttcctgttaaacaccctgaggactccaccggccaaagcctctaaccttaatctgataggagaaatttgcagagggtacctatgagagccatggtagggctccagggtaaggagggaagacaggtgctctaggcaggagatggaagggtggacgatgattcctgttaatcagtgtctgtggctcctagcttccctgtgcttcaagtgaaaggccaccataaaaggtttcagctgggatttgttactgagcgcgtgattgaatttccagtcactccaaccttgctatcccttgcatttttctaaattcctgaagtccgttaaaattaggctgcagccactgttccgcagcaagctggaagcagaaaaacaagctccgttgattggaccactcctgttgtaggagtctctgattcgcgttggttgaagtgataaaagagacgccattcagtgtgaccttgaagcctccttggcccagccgcctccaaaaggctgccgttatgcatttctaaccgggccaagtatgagtttttagaaggaccagtggggttgattgaccaagccaccaagtctgcaggccgaggcaagcttgggtgggttgatgtgttccccagtgcagcctggcgctgcctggccacaaggctgccacaggaaaggctgagcccgggtgctctaccccgcttcctggggactctgcttctgggatcagccatctggatctgcctcctttttgcattgttatttggtttattagagcaaattggtgcatccgaatggcagtgagtttattctccttctcgagcagcattaggaaactgcagccacaggggagggctctgaacagtggaatggaattcacgctgcaagcttggtgtttggcgttttttgggtttttttgtttgtttattttgtttttttaactgagcagatccagatgcccctgtggcaccaacttctcaaactcttgacacttgcagctaaagttctccacttaagcttgttcttttttttctcctttctcgaacacggtggaactgacagctgagttataaaatcctaagcctcctctgcatactcctctggggaaacacaacctccttttaaggagtgaaaatagaagttcaagcagatacacaggtgatagaaatacagagattaaggtcatcaaaggcttcagaacacacaggcagggaagagcccagggcaggacagggctgctgcctgcagctcttgacccagcccctcaggtacccgtgcagcaggtcccgagtcccacctgtctgtcccctgccttgaggggaacgggagccttaggaggaactgaggcagctctaattttgaaatataagaaatatttttgctcttctcctgtttggaagatctggaaagcaggagaggtctctggcttgcttctgggcagagtggtggctgccttcgggtctccctgcttccctcataatctcctgtcctgcatagtgaggggagcggcctctgacgcctcatcagggtgggccagagcaggcagcgcagttagaagggctttagcgctggatattgccagtgagagtctgacctagaaataattaaagataaaaggcaaggtaaagcaaggagtggggagggcccaggtggccctagtaacaacctgagccctcccacctcgcgggaggtgtggacgggaccagtaacaggaagccccgagggtccattctctcccggtgcccgcaggtctgggtgagctgcactagctccggatttggcagtggcttcctcctgggttcctgctcaccaggccgatgtgggcaggaggagggccaagtggggagtcagctcatgttctcaggtttggaggcagaggaccgcagggcagcccgtcctgccccctgagccctggccaggcatgtgcccaagcccccaggctcccccaggtccaacagcagcagcccaagcacctccagtcaccttggcctgcactccacccttcctccccttcaccttccctctccccttccccagggcccctgagggagaccatctgcagaagcctcacttgcaagggaggcctcccctcccttacgctgcccctctcccttccagggtcttgtacagcctgaagggttggagcctcctagaggccccagggcagaggggagtaggagggcaacagcttcggagcaagggctgcaaaccagaccctctccagcactgagtagcacccgtaatccctccctttgggacaggggctgtggaaagtagaaggaggtgatacaaggaaagtgctggagtcccaagcagctggggcatgaggtccttcagggggcagcccaccaggacccccaaatccacgcatacctacagctgggagagaggccagccaccaacccacatcctcggagagtgctgggctccacttaggacacaggactgtctgcccagacaaacgggagacaggctaggactgcttcctcagcagtgcagaggaggggttcccagggcagctggctctgggcctagaagattccaaagcctatggtagttcctgatggagtcgtctgtcctccatccagggcattaagaactaggaatgaaggggaatcggggagaataaaaacacaggaccacagcccagcggcctgggcacagtctagctctgcagagaccatggggctgggctgtccactcattaaagtgggcggccgccctcccatcggagggggaagtctagtgcagcaaaccctggcctgccttccgccactgccactgaggtctgtatttctcggaggggccctcctgttctcacccccctcttgctgtgctaactgcacctcctgttgccgacgggttccagaacgcagaggaaaactcccgcatctccatcaccttcttccgcctgttccgggtcatgcgtctggtgaagctgctgagccgtggggagggcatccggacgctgctgtggaccttcatcaagtccttccaggtagccgcccctcatgtcctgcggcccggggaatcgcagggctgccgcgtggcccagaacacagctgacacaaggaggagccctccactctggggccctgctccttcctctgtgtggcagaactcggccgctctgcctggctccctgtttccgcaccgagaggcctagacgaagcatgtggtttccaaggcaggctcagagccccagaaggccaggtggtaaaggagggatgggagctaaggggaggcagaaagggtctgccttacttttaaccatcgtttatgtctttctgcacaagaatttactggacaaaggggttttgtggtaaggaacaaacctgaaaaacacgggcctggacaacctggtgaccgctatggcccttcgagttcagcatttccagaatctggccatcgccctcctccccgtaggcgtttcagcagcatctgctgacagcacctgtcatgtcctcggccagagtcgcaggaccctggtgtcctccgctcggctagagaggcccttcgaatgggcccaggactgcctggccatgtgatcagttcctccgctcagccattgttttcccattaaaacagagtgacaatcagcccctgccagctcggaggagtctttgtaggtttgaagttaaggagaagcaaagcgcttgggtcacttgacttcccccagatgagcgcagaacccgtgaaggcggtttcatgcttccctgggctggcggaacgcaggcttctctccccccatggaggggccgctctcagcctttccaagacgagaatctgtcagggaagatggtctttgtgtgccccaccctggccagtccctgcccggggacagggcatgcctgggcctggtccaggtgaggaaagatgcccgtccccgctctgcccccagcagcctcctgccagggactgaccatccaaggctctcgagggagctcccaatggccaggctgacccctgcctagtgatgagctggggctcctgcactctgagcccagctcagcccaggctctggggattcggaatagtagacaccagcggaagcaggactgccgctgactctgtacttgggtgcacgcggaacccacggctgtgagttgccatactctccctgcccccccgacatctcctggggctgggaagaggcacagaccgggtgactgcgagggcctgatggcggcgcaggcgttcgggccaggcagctggcgcctgctctgacggcaccctctagtgaccggtggccacggctgaagcggcgcccgggaacacgggctgggcctcccatcctggggaccatggcctgtccccagaagtcacgggggctctggaaaattagttgtctgagttgccaggcagataatgcatggagcgaatagagcgtatggaacccagctctgcaaggcattgcactaagcactttataagccttaaatcttttcaaccacaaaaccgctgagaggtattattattgtttccatttttctgatgaggagactgaagttcagagaagttaagtgccccaaccctcacagatagaaagtggcagaaacaggatttgaacccatgatctttcttttaaatttttccttattaaatgtttccattgcaatagtaatacccgctcactacaactagtgggatggaattaagctgtgtaaagaaagggtgtaacttgccaccaccccactcctccacaggtaaccacagtcagcggggtgctgtcctccacgatttctcctgcctcgtacagacacaccgcacatgtgtagtcggaggaggttttgctcgttcttgattgttttgcccaggtagtgtcgcactatatcgttactctgcggcctgctttgaaaaccaagctgaaatgggaagtcagttccggtttctcagaccttctcgcaggttccccgtagtcctgtgggactcttggaagtgtcccccggcccaaaccgggcaatagctgatggctgcagagacagggatgcggcgctccctgggaaggggcccagctggcctctgcactccagcctcatgggagtctcctgcacttccttccaggccctgccctatgtggccctcctgatcgtgatgctgttcttcatctacgcggtgatcgggatgcaggtagggaggctcccaccacggggctcctggcctcccgctctgtctctccccagttcccagcaccacattccctaacgccttcctccctcccttctccctttcattcctgactgtccctctccctcctcttccattttctgaggcccaaaaagccacaggaattggaactttccccaaatggatctcctgtaggtagcaggagaatgtcccggtacagaatacacagcccagagagcctccctccccgaggcctgggttctgctcttggtagaggaaagacactctccagttatgcaaggggcctcgggacagacacagccccttctcaagaaacagcagcaaggtgtgtctgtttgtgtccagcacccctgtttgtgtccaggtctgatgggcctgagagttaccccaaccagattcatttgaagctaatggctgagagggagggagggaagaaggaagcaaggaagggccaaatcaacacaaggttcaccgcatcaaatgtgcagcagttttctggggcctcccctcccaggtgcccactgcaccattcaccgcaaacctagggctctccattcccgtcttggggctccagcttgagtcccaaggccaaacttggcagggcgcccacactagcccaaagcgcttcctcggccgctccttcaggaagtcccctacttgctcatcgcagaaagacccaagattcagttgccaaaaccttttgagactaaaagagctaccttgatacctgataaaggtggcagtttctaagataagcacagctttaaaagaccaggaagaaaagggatttcaggaatgcattaagcttgccctagcctcagatcactcactccacatcactccaaaatgcaagaactaaatttgaaagagtgcttggacatgcagaactgaaatagcaaagaaaataacgcagtgcgtcctgtgtcctgtcagaagcaggatcccggtcccagcatccaccgctctcagccccagctcccactgggctgcagggaccttcctgaggctgtgggcactttgattctcatgcttgtccagtgtagggatttgggctcaggggctgggtggggcagcaggtgcctgccaggttgcatgggaagactgttcagcttgtggcagccagttccagggacacctgagacccctgaagagaccattgaacaatggtgggaaattaggaccctatctgtccacaaatcactgaacacctcttccttctctctcctaggtgtttgggaaaattgccctgaatgataccacagagatcaaccggaacaacaactttcagaccttcccccaggccgtgctgctcctcttcaggtgggtccctgaagacataggtgcacagatacacacacacctgcatggtgccacactgtggcctggtggtagaatgaaagggaactgcttcccggggagtaggaagggagaggatgtgttgcttgctctctgcctgacaaggaggccagtgggtccattgtcatttatgataactttccacagagcaacccactatgcactggcacacctgctggaaaccagacaaaaccattaggggagcaaaagtcacatgctaaaagcagcctggcttggaatctgaacaggcccaaagccaacctgccgacacgctttgtgaccttgagtgagatatctaacttctctgaacctcagttttcttgtccaataagtacagatatctatcactataccagcacctgtgccatttgccgtgctgggcgcttatgtccacatgcactgggcgtcatcctcacttaatcctcaacacaatactagcaaactgaatccaatagtacatgagaaagatgatacatcatgatcaagtgggtttcattccaggggtggttcaacatatgcacatcaataaatgtaagacaccatattaacagaatgaaggaaaaaagacccacatgatcatctcaatagatgcagaaaaagcatttgacaaaattcaacatcctttcatgataaaaactctcaacaaattaggcatagaaggatggtactgcaacacaataaaggccacgtatgacaaggccacagctaacatcatacttagtggtgaaaagttgaaagcttttcctttaagatgaggaacaagacaaagatgcccactctcaccacttctattcaacataataatactggaagtcctagccagagcaattaagcaagttttaaaaagttatccaaataggaaaggaagaagtgaaattttctctgtttgctgataacatgatcttatatatagaaaatcctaaagaccaccaaaatctattacaactgataaactaattcagtaaagttgcaggacacaaaatcaacccacaaaaatgagtagcatttatttacactaacaatgaactatctgaaagagaaattaagaaatcagtcccttttacaatagcatcaaaaaactaaaataaaatacttaggaataaatttaatgatctaaactgagaactcataaaacattgataaaagaaatagttggtgacacaaataaatggaaagatatcttgtgttcatggattggaataattaatattgttaaaatgaccatactacccaaagcaatctacaaattcaatgcaattgctatcaaaatgccaatgtcattttttatggaaatggaaaaaacaatcctaaaattcatatggaaccacaaaagaccctgaatagccaaagcaatcttgagcaagaagaacaaagctggaggcaccacaatgcatgatataaaaatctgttacaaagctacagtaaccaaaacagcatggtactggcataaaaacggacacatagagcaatggctcaggagagaaacctgagaaataaacccactcatttacagccagttgattttcgacaaaggtgccaagaacacacagtggagaaagaacagccttgttaataaatagtgttgccaaagaggaaaaagggaattactttcaaaatcatcattagcattagacttctcattaacaaaagtatatatgtaatagaagacaatggaataatatgttcaaaattatgaggaaaaatgtatttttgaatctggccctctaaatacagtctaatcagcattccagtagtcaagcaaaatagagacatttccaagtgtttaaggacccataaagtttactccccaacataagtcttccctggagcaattactcaggctgtacttccacagaatgaaaaatgaatcaaagaaatagaatgagcagagtaatgatatgagtaaaaaataatgaagtttatagttatgagttatgaacaaggacattataaagtttatataaagtctagatacttgttaaggggaaaatgtacaaaaccttaatgacaatttggaagtaatattttatgttatctctacaaggtaggaagtgaggtggtagaagaatgagaaacatgaaaccatgctaagattcttctcttgtttggggataagagtatatactgtttaattctgtacataactaagggaaaagtgtgtatacatatatatgttaaagatttaaaggtcaatcactaaaaaaatagaaatggaatgtatatattctaaaccactagaggaaaaaaatggatggataaaacttagcaatccatcaaaaggaagctaaagtaaaagtagaaaaataaataaaacatggaaattagaataataaaatgagatggcaggaataagaacaaagataataattgctaaacttattgaggtaaagttcactattaaaacatagatactctgatgttggctttaagaaatctagctctagcctgtttataacagctacagtaaaacaaaatggcctaaagaaaatgcaaataaaaggatggaaaaacgaataccatgtaaggctcacaatgtagacgtaataatagcagtagcagaagaaatagaattccaggtgaaaggcattaaacaagacaaagagggattttatattgataaaaggtataatccatcaaaaatatataatagtcataaaactacatgagcctaacaatatagtttggaaatgtatcaattacataccaatagaagtataaggagaacacacacacacacacacagtggaagatttaatacaggtagagcatgacagaccaaatagaccaaaatagaaaaaagggtaaagaatatctaaataatacaattaacagacttgaacttatcgagttatactcagtaaatggccaaaaaaaacacattctttttaaacacctcagaaacattcacaaaaattagccaagatttaagtcacaaagaatttaacaaattctacaactgcccctactttgatatagccaaattagaaattagccataaaaacaaaaacccctccaaaatctacttaaaaatttggcactcttcttagtaactcaaagctgaaactacaatctacagtcatgcaccacatgatgacatttcagccaatgacagactgcctaaaattaaaatggagctgaaaacttcctatcacccagtgacgctatagcatcaaaatgcagtgcagtgccttactcaggtgttcgtggtgctgccagtcatagataagtatggcccatacaattatgtacagtacataatatttgataatgagaataaatgactgtgtcaccggtttatgtctttactgcactatacttttatcattattttgcagtgtactgcttctacttatttttttttaagttaaccgtaaaacagccttaggcaggtcctgcaggaggtattccagaagaaggcattgttatcataggagatgacagctccatgcatgttagtgcccctgaagaccttccgataggacaagatgtggaggtggaagacagtgatgttgatgatcctgaccttgagtaggcctaggctaatgtgtgggtttgtgtctcagcttttaacaaaaagctaaaattaaaaaaaaaaagttcaatattaaaaaaacataaaataaggatatgaagaaaaatattctgcacagctgtacaatgtgtattttaagttgcgttattacaaaagagtccaaaagttaaaaaaaatttaaaagtttataaagtaaaaatgttacattaagctgaagttaatttattactgaagaaagaaaagtactttttataaatttgtgtagcctaagtttatagtgtttctagtctccagtggtgtacggtagcgtgcagtcatgtcctaggccctcacagtcactcaccactcactcactgccccacccagaacaactttcagtcctgcaagctccactcatggtatgtgccctctacaggtgcaccgtatttaaatattttttactgttccttttttactgttcctatttttactgttccttttcagtgtttagatatgtttagatacacaaatacttaccattgtgttccagtttcctgcaatattcagtacagtcacatgctgtataagcttgtagcctaggagcagtaggctgtaccacagagctgaggtgtgtaatagctacggcatctaggtttgtgtgagtccactctatgctgtttgcacaacagaattgcctaaccatgcatctccccactgttaagtgacacaggactgtacttagaaatgagggccagggcaccagatcttaaacgtatgagatgcatcaatcagcaccaaagaaaaaattcagagcctgaaatttatttatttatctaaaaagctgtatattaaataagctaatagatggggaaaagaatagtaaaataatcccagaatatgaaggaatgcatttttaaaaataaaagcataaattaataaaatatggattttatcaataaaccctaaagctgatcctttgaaaagaccaataaacagacaaaccatcaaatccaatttttttaaaaaaaaacacaacaacatcagaaatgcaaaaagcaacataattacagatgtggaagtgatttttagaatgataagagaatttcatgcctctgttttgtggcacttcagaggtgatcatctacttcaagatgaagcagaaagtctccttcccagccagtggctgccagaaactcattgaagtggacagtgaatgcaaaccataccttttatgagaagcatatggcctcagaagtcgctggtgccactctgggtgaagaatggaaggcttatgtgggtggaatcaatggtacaaatgacaagcgaggtttccctatgaagcagtgtgtcctgacctgtggttgtgtccacctgctactgcatacggggcattctgttatagaccaaggagaactgcagaaggaaagcacagattgttcagagttgcattgtgggtgccagtctgacttcttaatttggtttttgtacaaaaagatgggggggagagaaagatatttctagactgactgatactactgtgccttttcacctggggtccaaaagagatggcacggtccgataacttttcattctccataaagatgatgtccatcagtgagtaaacccctaaacaaaggatgtcaggaacccaggaccaaagcacccaagactcggcatcttcttactccacatgtcctgcaacacaaatgctgacgtattgctctgaagaaacagaacactaaaaaaaaaaataagtaaggcccggtgcggtggctcacacctgtaatcctagcactttggaaagccgaggcaggtggatcatgaggtcaggagttcgagaccagcctggccaagatggtgaaaccccatctctactaaaaatacaaaaattagccaggcacggtggcgggcacctgtaatcccagctactcgggaggctgaggcaggagaattgcttgaacccgggaggtggaggttgcagtgagccgagattgttccactacactctagcctgggcgacagagcaagactctgtctccaaataaataaatataaggaagaggttaaacaatatgctaaacttttggccaagagaatgaaggagaccaaagaaaaatgccaggaacagatttccaagacatggaggctatgctcactgagagcttctgagtctatcaaaaataagattttcaccaggcatggcagctcacacctgtaatctcaacaacttgggaggctgaggtgggaggatcagttaagaccaggagtatgagaccagcctgagcaacacagcaaaaccccatctctaaaaataaaaaataaaaatattagccaggtgtggtgccatgtgcctgtagtcccagctacttgagaagctgtagcgggaggatcacttgggcccaggagtttgaggttacagtgagctaagatggctccactgcactccagcctgggtgatgaagtgacatcccatctctaaacacatacacacacatacacacacacacacacacacacacacacacacacaagatttttctaagagtagcagacaaataatatcagacttttaaaaagaagacagagaacatcatgaacaaatatgcaaatatatttgaaaacctaaatgaagcagacgcttttatgtagaaaataagaattataaaattatcttaagaattaaaaaaaaacaactacaacagaaattgaaaaggtagttgaaaatttagcctttgaaaaggcccaaggttcaatatttttatttgtgaggtctaccagactatcaaggagtggatcattccaatgttatataaactttccaggaacagaaagatgtagaaaacctcttcacccactccataagactaatataaagctaatgccaatgagaaaaagagaaaaaagcaagcagttataaatatgaaaatatgtacacataattgtcattgtttgcagacaacaggctaattcaagtagaaaatccatgcaaattaactaaaaaccctttaggacaatagaattaataaagtggaagattaaaagattaacaaagaaaaataattgctttcctgtactggtaataactaattagtaaatgtaatagacaagatcttatgctatcactttttcaatgttattattttgtaactcttacccaataaaataagacaggaaaggccgggcgcagtggctcacgcctgtaatcccagcacttcgggaggccaaggcgggtggatcacgaggtcaggagatcgagaccatcctggctaacaccgtgaaaccccgtctctactaaaaatacaaaaaattagccgggcgtggtagcaggcgcctgtagtcccagctactcaggaggctaaggtgggagaatctcttgaacccaggagatggaggttgcagtgagccaagattgcgccactgcactgcagtctgggggacagagaaagaccccatctcaaaaaaaaaaaacaagacaggaaaaataaatcaaaggataagaattggagaggaagaaacaaaattaaatgccaaaaaagttgattgcctgtgtatatatacaagaaaaattacagaaaattgctaaaactgataggatagtttagcaaatattctgtaatatgaaatcaattgtattccctctatatcagcagcaaatggacatagcttttaaaatataatgttgaaactataccattttaaatgtacaacaaaataaaaggagagagatgccacgtttctggccaggagacttaatatcataaagatgtcaggattctgcaaatgaattgacatctcagtgcaattctaataagactcccaacaggattattcacagaggctgaaactgattctacagtgtctatggaatagaaaaggaaactgaatagccaagacaaatgttgaagaacaacaggttggcaggactcctgcactgtgagagggcaggacttactataaggcaacttactatgcagacaacacagtacttctgtaccaagataaacaaataaacctgaggaatgcaatgacaaggctagaacaagacccacacatctacgcaaatacaacttacggcagaagaaatatttcaattaagtaggtgaagatgtactattcaataaatagtattaacaaaatgacttatctatgcagaaaaaataaaagcatatttctacctcatatcaaacatgaaaataaatttcaggtcaataagttattgcggaaaaacaaaactttagaacctttagaagaacacagaaaagaatgtctttatgacctaaaatagagaaagattttttaaacgtgatgcaaaaagcacagaacatagaggaaaaaactataaatttgacctcattgaaataaaaaacttagattcaccaaaatacaccgtaaataataccagagacaacccacaaattggaagaagatatttctgttgcatataactaacaaagggttaagaatagacacgaaaccaccatgagactccaccttcctcctgcaagaatggctgcaatttaaaaaataaaaaataatagatgttggcatggatgtggtggaaagggaacacttttaccccgctggtgggaatgtgaactagtacagccactatggaaaacagtatgaagattccttaaagaactaaaagtagacctaccattccatccagcagtcccactcctgggtatccacccagaggaaaagaagtcattatgtgaaagagacacctgcacacacacatttatagcagcaccatttgcaaaatgatgtaatggactttggggactcggagaagggcaggaggatggtagggatcaaagacgactgcttgggtgatgggtgcagcgaaatgtcagagatcaccactgaagggcttgtccgtgtaagcaaaaaccacctgttcccaaaaaactattggaaattttaaaaaagaatagagaatagagtatcttttttttttttttttttttttttgagacggagtctcgctctgtcgcccaggctggagtacagtggtgtgatctcggctcactgcaaactccgcctcccgggttcacgccattctcctgcctcagcttcccaagtagctgggactacaggcgcccaccaccgcgcccggctaatttttgtatttttagtagagacgaggcttcaccatgttagccaggatggtctccatctcctgacctcgtgatccgcccacctcggcctcccaaagtgctgggattacaggcgtgagccaccgcgcccggccagagaatagagtatcttaagcaccctacaaacgaacaagaagacaacctgaatcaaacaagcaaaaacatgaacatgcaatttaatggaagataaaatttaagttctcaacccactaatcattttataaccaaattaaaacagcagtgacatattatctcacacaaattatatgagcaacatttaaaacaattcactaatgaactgatgagtttgtacagtagtgttatttctcctacactggtaataggagtctaagttggacaaatccttggaggtcatggaatatctagtaaaaataaagatgcatgtagtttaactggcaattccacttctaagtggatacccaagatataaatctgcatgtttattgcagtgttatttgtactagtaaaagaaaaaatgaaaaacctaaatgttccttaacaggacagtggatttttttacggtaagttcatagagcatactcctgtacagcagttaaggtgaatgaactggaactaaaatacatccaaagggctaagtctcaaaaacatcacatggattgcaaaaacagcaagttttcggaaaaggtgcaatttgttactgtttatataaaattttaataatgctatgtgtttcatatttagcaaatatatcagagcattcagggaatgatgaacatcaagttcattttagtaactccctctggggaaggaggaaagggacaggtggggagggatgcagagggccctccttggcatctgtaggatgggctgcatgaacgtggctctccctcccctccaggtgtgccaccggggaggcctggcaggacatcatgctggcctgcatgccaggcaagaagtgtgccccagagtccgagcccagcaacagcacggagggtgaaacaccctgtggtagcagctttgctgtcttctacttcatcagcttctacatgctctgtgccttcctggtaagccaagggggaactcaacagccagcagccatgactgcccagttccagggcagtctgaaccgtccatctctgcagctcatggtcagggcaaccctatcagaggagctggcttgggaagactaagttggcaggagtgtccagccacatggagagaaaggcagaaagccctgggccagagtgagctccaccagcatcttgcttgtctgttcttggctgttgtcatggtggcattgtcccagaggacaacggggacatgtgggggcctagaaagaactgtacttttttggcatcttgctgaggagtgaggaaaaggggataaagtccccctctgtcctgcacagccctgcccagcagctcggtaggagggaagctgtccagcccacctgtgggttcatcacacacaactctcagggaaactgtgtcaagtttatgtccaagagacccaggttctcaggctggtaggatggatgactggtctttagaaatgttggcttctgccatcagtaggccccagctggcaagggggttccagaggcaggtgtgtaggaaggtcttctcacagcacctcattgtactgttccccacagatcatcaacctctttgtagctgtcatcatggacaactttgactacctgacaagggactggtccatccttggtccccaccacctggatgagtttaaaagaatctgggcagagtatgaccctgaagccaagtaagttcccagagggaaatcctgattccccaagctgagagagggtatagctgaccatacctgcaggaggggctcaaggttggccaacactgggtggatcaattagaaacactggattgtatcacaccctagggtgaaaggtcaagggccagcaggaggaggcccggcaccttcaattaagtcaagaatgtatctactaggttgggtggggtggctcacacctgtaatcccagcattttagaaggcaaaggtggttgaatcactcgaggccaggagttcaagaccagcctggccaacacagtgaaccccatctctactaaaaatacaaaaattagccggacatggtggcacatgcctataatcccagctactcaggaggccaaggcatgagaattgcctgaacctgggaggtggaggttgcagcgagctgagatcacaccactgcactccagcctgggcgacagagcaagactccatctaaaaaagaaaaagaaaataatatatctactatattcagttgaatggaaggataggaaattctagtatcaggaataactagtaagtgctcaagttaggataggtagggccggggaaaatcttgattccattcccgcttctggtctaaagatcaatcacattcggctgaccctcagtaaataccttttggtcagaaggttagttcattcaatcagcaagtatatattgagaattttgttgcactgctaaaatcccttccaccttgaacatagcatgggcagaaaatgattcattaaaatctaaacacgtgtatatgtatattggtttggggctgtgtcatgcaattctgcaactctgtactgagtgtgactaatagggctaccacactgtgcagtgttgcccatatgagtgggccctacccctcaggcgcatgcgtcctgggctgctggcagagaccgtggctctctgatgccctgtccctcctctccctcctcttctaggggtcgtatcaaacacctggatgtggtgaccctcctccggcggattcagccgccactaggttttgggaagctgtgccctcaccgcgtggcttgcaaagtaagagataacggggttcatgggagggagagggaaaataggggaagtgaagtgcccatttcttgtgatcctttaagggaatgaacatactagtttatgtgcctaaagattacattttaagggtccttccagctctaaattctcagactctatgagggaataacagagtgaatgcctcctgtcctactgagccagggacccagtcctggataaaggacttgttcagtccatcccactgcaccatccgggcatcctggggtgggagacttcccagcctaggctagaggggttcggcgttcttttcctggagttggaaggccattagaaagcccaggcattgacttcaggggtctttgagtcctaaaatttttcataaaatcactaaaatacaaagtttaccagggagaggatttctcactttaatcagattccttagtgagaccatgacccaaaaaaaaagtgtcgtttccttttctccctcccctccaccatggccactccacgctccttttctccctcctctccaccgtggccattccgtgctccttgttggggcaataatgagctgacagagagctgggggaagggagaccagagggctggagagaggaggaaactcagatggcaggaggattcggctctgtgagaatccactcatggaaaacgcagattgagggaacatagaaccttctacttgtgctctgtttactgagtttcttctcatttgtgcctccactttgctccaaaaacaaacaaacaacaacaacaacaaaaacagattttaagagatttccaagggcatagaaaatatcagaaaagagcataaaataaatgcaaggtacaaacaccatgcaaggcaagggtggggaggggtgcagcctggagggggctaaagtgcgtccgttgtggcctccggacgggcctgggcaggctgaagcctgggtgcgaaactttccggtggccaagatacagttcacaccgtccatgaggctcatcaagatctggtcactcaggagaagtgtaacccttctagacactgagattagcaggaggtcaccgtgtgagctgacaaatagccccccttgagcatgcccttggcatggacgctgtggtgagcttcacaccgcgcttgctcgtcatgacccattgcatgctgaaggccccacaccagagctccgtgccagggaagcctgttctgggggtgtgtgctgggaaagaagagggcaagacagcactatccagtgtcagcaagcttctgctccaacttgatgcagaagcatatttgtcaatacacagagaggacatgtagcatctcctgcaggcaaagctcctgtgatcctttctcttctctgggctgtggacgaatgctgcctggcaggtgggctcccagcacatgctggcgtacagccggtctttgctgccagtggagagcacacctgcacgcctgagcagactttcgagcagggcgcaaagttgggtggccttcacatccttttgtggaagtgaaggtctaatgaggacaaatttcatacctctcccactccacgaggagggtcaaaagtagttgtggcaaaggcaagattctccctggaatgcttcagggagcattcactccctgcccactccagcaacacccacacaagctgcgtgtcacccccagcatcctctgtgtattaggccatccttgcactgctgtaaagaaatacctgagactgggtaatttataagaaaacaggtttaattggcccacagttcagcaggctgtacaggaagcatggcactagcattctgcttctggggaggcctcaggaagcttccaatcaatcatggtggaaggcaaaggggaggcaggtacgtcacatggacagacagggagcaagagagaagggggagggaccacacacttacttaaacaagcagatctcatgagtactcactcaccaaggggatggtaccaaaccatttatgagaaatccaccccatgatgcaatcaccttccatcaggccccacctccaattctggggattacaattcaacatgagatttgggcgaggacacagagccaaaccatatcactctgccacggtgttctgcggtcccctaagcaccgcctgccatcatcaccagctttgcttctcttcgcctgcagcgcctggtctccatgaacatgcctctgaacagcgacgggacagtcatgttcaatgccaccctgtttgccctggtcaggacggccctgaggatcaaaacagaaggtaaggtcgcccgtgggcactgggagagacactcagaaggtctagcagacaatcagagaggagctcggcagcctgcaaagtgctcaagggaacttcctgccccagacagcatccgagctgggatacgggggtaacgtgcgctccaggacatcgcagggccccagcctgctcatgacttctttgctcctgaatggtctccctgcctctagctcaggggtttccaatcttttggcttctctgggccacattggaagaattgtcttgggccacacataaaatacactaacgatagctgatgaactgaaaaaaaaaattgcaaaatactcaatgttttaagaaagtttacgaatatgtgttgggccacattcaaagccgtcctgggccgcatgtggcccatgggctgcaggttagacaagcctgctctagcttattcattttgaactctagctttccatgaaactctgggactcattctgggtggtatcttgaagtcagagggtatagctcacaaaacagaaggagacgggtgttacctgaagcaggaccaacccctgtctaaaagaacttacactggctacaggtgggtgtctcaaatgctcaactcattaaattaataggactgtgctgggaagacgtgtgggaaaggggacacagtgacaagtggtggccgtggtggaggtcatcgcacacattgtgcgggctgagcctggcttaaggctcttagccagcggacaggtgaggattcagacctcacctgtgccacctagtcagaccgggctccctcagggctgcgtccacctggaggggcccttctagttttcacaaggcaccctaagggctagcagcagcctgagtgagataatctgcttgctttatgatggataagagtttgcgaaccactatgggaaaggctgtattaaacacacctaacaagataccatttctctccaagagtgtccagccttggagtgtctagtgtttcttagagcgtggtcaaaagaccaccgctgcagaatcagctttgggtacctgtttaagctactgagtcccaggcacccacacagacctgctgatgccaaatccctgagcatggggcccaggaatctgcatcttgaaccaactacagagatgattcaaacccactggtgtagtaattacagaaaacacagatgagacaagcagtatgcttccttccccttcctacacttccagcttaaagctcaggctgtccgtcagtgtgttcctcggggcaacagaaggagccccgggcaggtgggaggctcgaatccgagtccctgctctctcactaatgacatgagtatgagccatttactctctctctacttcagttgctccattggtagactagagaaaggtgatgacatctgggaatttaattcattgaataacccagacatgggccttctctccgttagatccttcaaaaacaataacagaaacatttcaaatgaagtgaaacaagaaccagtccaccaagacacaagtcaaaataattagctgatttttaaaaaataaaaataggggccaggcgtgctggctcgtgcctgtaattccagcactttgagaggcccagtcgggcagatcccgaggtcaggagattgagaccatcctggccaacatggtgaaacctcgtctctactaaaaatacaaaaattagccgggcgtggtggcacgtgcctgtaatcccagctactcaggaggctgaggcaggagaatcgcttgaacctgggaggcagaggttgcagtgagccgagatcaccccactctagcctgggcgacagagtgaggctccatctgaaaaaataaaataaaataataaaaataggacaagttctgctactaaattaaaaaaaaaaaaaagagcaaaggcttaaaaaatataccatcagtagccaatgcaatcactcaatctgaaatgggtgtaaataggcctatttctgactgccagaaaaccaaaacacactttttttttttttttaaatggaatctcgctctgtcgccaggctggagtgcagtggcacaatctcggcctgctgcaacctctgactccctagttcaagccattctcctgcctcagcctctcaagtagctgggattacaggcacgtgccaccacgcccggctaatttttgtatttttagtagagacagggtttcaccatgttggccaggatggtctcaatctcctgaccttgtgatctgcccgactgggcctcccaaagtgctgggatgacaggcatgagccaccgcgcccggccaaaacacacatttaattcacacatatgtgtgtataacaaggaagaaaactgggaaggaaatgtgttcgtatgctaacactgattatcatgagtagaaagatcagcagtgacatccaccttactcctttagtttttttactttccaaatgttctgcaaggaatgttactcccctatgttcagagggaaggagaggcgatataaatgactgccaggaggaatatgctgtaatacttaaagattgatgtaaattaaggatgtgagattttgttccctagaggaacaaaaggcagggaggtatggaagcaagaattcagcagggtcgaaggttcactgtcaaagccaaccacatgccaactaaggaagaccaatagctagtaacaatgcgaaagactgaccagtcaaatgcagggacccaattctgaggaaataagagttccagagaaaagaggagaagccagccatgtgggaactacaatcctgtcaagaattacagactatcttttaaacacaaagacatttcagaacagctaccaaagggcccgaaacgcccccacccaagggtgagccttcatcagacatgggccctccataaacttgttaaaatcgaaacgcccccacccaagggtgagccttcatcagacacgggccctccacaaacttgttaaaatcctaagaaagaaagacaaagtcaagtcttggaagcaactagaaagaaatgtgagaagacatctacatttgtgaagatgaggcttgcatcagtcctcacccttcagacttctcagcgtggaaggaattggggcgaaattaacacctacctcagagaagcagagctgtcatcccaagtccagtaccaagccaaagaagcttctctcttggaacgtagaaggaagagctctcatcccaagtccagtaccaagccaaacaagcttctctcttggaacataaaaggaagatagtgaaaaatacttagatgacatgaaacaattgtcggtgaacttcaacaattacatagaccatcatgagaataaattaaggctgataaaaaaaaatgaaaggtccttttggaaactatgttaatttcttaggtctgctgtaacaaatgatcacaaactgggcagctggaaacaagagaaagttctctcagtttaggagaccagagacctaaaactaaggtgtcagcagagttggttctttctggaggctctggggagagtctgttccaccctttctcccagattctgagggctgtggatgatgcctggtgtgcactggctcacagcacatcacgccatctgtgcctccatcttcaaatagcctccagggtcttgtgtcctctcctcttcttggaaggacaccagccacattggacttagggcccaccctcatccaggatgacctcaccttaactaattacattggtgaaaatcctatttccaactaaggccacattctgaggttctaggcagacatgaattttgggaggacactattcagcccagtaccgaagctaagtatatttgaataccatgtgtgttaggatcttgcactgcgtgtgtcagaaacctccagctacctctcccgtgatggggactgatcatctgtgcagctggaaggcccaggagtcgtcccctgccttcaggtcctgtttggatctggcatttggggagctcgggattccgtcaatccctctactgccacctctgcatgctctgccctgtggccccagaggtggatttgaacccaggcagtctgacacaagagccctcaaccacaatactggactgccggtcctatgcgagagcagtaaacatcccgtgttggtttcctactgctgcaaagcaaattactacaagcttttcagcttaaaaagacaccccgttggctgggcacggtggctcacacatgtaatcccagcactttgggaggctgaggcaggtagattacctgaggttgggagttcgagaccaacatggagaaaccccatctctactaaaaatataaaattagctgggcatggtggcccatgcctgtaatcccagctacttgggaggctgaggcaggagaatcacttgaacccaggaggtggaggttgcagtgagccaagatcgcgccattgcactccagcctgggcaacaagagcaaacttccgtctaaaaaaaaaaaaaaaaaaagacaccccgttagtagctcatggttttgcaggtcagaagtccagcagtggtgaagctgggctttcataaggcaaatccaggatattgatcaggccatggtctcttctggaggctctgggggagatcatgttgttggtggaattcatttgttgcaattgtaggcctgagatcctcactttcctgctggctgacagctggggaccccctctgctcctagaggctgcctctctcagttcagcccacatgactgtttgctttcttccaggccggctggagagaactctgcctttaaagggctcatgtgactaggtcaggcctgcctaacctccctgtcttaggtcataggtgccgtgtgccatataacctaatctcaggagtaaaatctatgatggtcaggggcccagggctttggcagcatgtgtaccctgatgaggagcatcttagaatcctgtcccctacatctgcccttacagctgtaaggctcagctttcctttttcatcactgtaaggctaggaccccagaggctgcataaggcaggcatctaagtaggggaactcgggacagagccctcatcgacagatgtaccctccaatcatccatgttccctgtgactgccgaaggaggtccatgagaaatgccacccatggggaccagccccccactgcccgtggcagggccatacgtgttccagctggtgagcgcatggccgccattgttcctgcccaggggctgggctcagtctacaaggaagagcactgagtgccggtggaggggccccctggctggcctgagccacaggcagggggaaggggacaggaatggcattggacggggcacaagagggaagggggaaggaaggaaggtggacagaggaaggggaagaggaaggaggtggaaaatgggaagactggggagaagtgaagcaagcaagaaagaaactgatgagtcagggttgcgtggggcagatgccaccatctgtggcttcctaccttacgcagagggacccagcccatcagaggcccaccaaggggctgaggatcctttccgccctgcagggaacctagaacaagccaatgaggagctgcgggcgatcatcaagaagatctggaagcggaccagcatgaagctgctggaccaggtggtgccccctgcaggtggtgagtgctccctggactcccgcaccttggccactgcctggccgtgcccccctctgcctgcctctcctccagctgtggcacccttagaatgcggaagcatcccctgagacttgcttcttgagtcccctaggcttgctggaggtctgccttcagacccttcctgtggggctcagaggccctgttggttagaagggaggcaggtgcaacgccctgcacaaactcagaaacagaaagtcaggttggaaatctggtacaaccctgctttttacatagggtaacaggcaagtccctgatgcttaggggtttggcagaacttctaaagaaactccacaaagtataggtttcccataaacctgattgctgtaggattgctctaaggccctcaaacgagaatcccctgagattcctcccctcttggatgacattctttttgttcttccaagagcagtgtttcttgaccctatcaagcctcaaatccctttttatagcaaagagtttatattgcctttactatgatcctgaatgaaaattataggtaatataactttcctatacatataatttccaaaatattaatataatgccttcactctaacataaaatctattaaaagcagatgtttccaatatgtaaatactcaggcataactataccagcaggtacatttaattgatgagatcttctcatgcacccacttacaacacatacggctgggttcacaggaaacaagacaatactgaatactgtcaacactttgatttgccattttgaaataaggggtaaatcagtatattaaataagtgtgtgtataaatagccccccacacataaacacacacacatacttacacatatgcagaacaaccgtgatgtgacacttacggtgagtgacccacacaccctaaagagcattgccatcaggaatacagttttccaaaatgcgaacctctcttggccaagtttaaataatccaaagtatagttttcctcaatttacacagcagttgtattcctggaaattgtcaggtgtgttaaaaccatgcaaaacaatgtcctgtgttcatttgcaaaatgaaattatgttccgagcccagagactcctaagcagaatcatggatgtgtggcataagcttgagagccatgcagagtgcaaagctgtgattgcagaacatgcctgcactttaagggacaggtctggagctacttaatgctagtggcacccccacagtaccccgacaactaaaaaccaccccacacatttactgtgccctccttaagaggcgacaccacttgtgttgagaaccatttgccagagggaaagccggatttgggctaagcgaaaatctcgccagtgccatgtgatgtttacatacatcgttttattgaatcctgacaacatttctgtgaagtttgctcagggaactaaagttcttagaagctaagttgctggcccaaggttacctggagagtccacagcagattcaggattcaaacccaggccccagggaacctaggactccaggtaggactccaggcttgtcccaccatgcagttcttccttcctgactatgctggacaggggaccctgggtttttccctcccacgtggaaagggggtgcttgccagagaagggaggggtcatcactgctatggatgtggctattttggagggacaggtaggaggaggagaaccctcaccagcccctagatttaatccccagctgtctcttgggcccgtggcatctcttcacaaagaaccaggaggtagatccaaggggctcctccccaggcatgaaatgtttcctctaagaacttatggcttctccaccatcaggtttactcccaggaaagggactgatgatgtcacatataatcttgggtatccagcccagcagggatgcagccaagccacctggcacaaaaactcaatcgggtttgaaagaaaaatccaaacttccatgggaagaaagccctccttccaccagcccctccctccgagctaagctgaaccgttttgcacttgcacttggaagagtggccagttgatgagggacatttgaagctctggaatcaaatgtatcagttcagttaaaaaaaaaaaagcgggaaataattttgatggtaggctaccttttgcataaaaaaaacaggagataatatgtttgatgatttacataactaatttgcactaagaatctctgagaaaatactcaagaaactagatgatctacaggaggtggtgactaggcagataagggctgtggtgggagagacttttgaccataagcctttttatggttttttttctctctttttaagccatgtgaatgtattacctctccaaaaatattaaagttttaaaaagttttggatgctgaaaaaaaaaatgaatgaagttcaactgaattcccctgctcccctcttaccccctctcccctctccatacgtctcagatgatgaggtcaccgttggcaagttctacgccacgttcctgatccaggagtacttccggaagttcaagaagcgcaaagagcagggccttgtgggcaagccctcccagaggaacgcgctgtctctgcaggtgagggcctgggggcgggcccacactccaggaaggtcctggtcattgcctctgacctccagtcagggtcccggtccctccccagcaggctggaggccaggtccctgcagagggaacctttcagagagctccagacctttccaaagatggctgtgagaagggggtgatgtgcccttccctacctgccacccaccgactgccctccatggttctgcctgctgtcatagcccccagatctctcaaatacttcactgaggctcccgtgacagcccctgacccctggtgccccgtcctaatgagccttcatccctcctggatgggcgagtggattgttccatcagagggcagcccagcccccagttcacacacacacaaaccttccggagggtcgactggctgggtggaggatgccagggccctggagggacaggtcttggcccgaggctgtggctggctggggagcttggaggaaagggagcgtggtcctcaccatcctccccttggattccaggctggcttgcgcacactgcatgacatcgggcctgagatccgacgggccatctctggagatctcaccgctgaggaggagctggacaaggccatgaaggaggctgtgtccgctgcttctgaagatgacatcttcagggtgggtggtgccatggcgcactctcgacccctataaagttcagtttggagcaagaggttgggctggggttttgcggggaacgtccaggggaaggagctgcaccagaggaaagggctacttccaggctcttcctgatgagctgtctcctcacccctttgccttttccaagcctgactccatcccaaggcagggctccctggaaacagcagctctcagtgtcactggctctcagagaagcgggaaggaaccgccttcctaagggaaatgtttcctaggagaaacttctgcattagaagttgcagagtggtcacccctggggcacatctaatctgcaggcttgttttgtttgttaatatttgaaaatcaagacttctggcattctttggaaaagtcaggagacctggtaatattaagcttgcattcccacagggcagcagagggccggagcctagaggcggtggccctttgagatggagcatagcgtgtgttctccaggtctccaagacccctccagaactcccctttccctctcctttcctggagactgaagctgcccagcagttgcaatagtgaaaattaaaacggctgtaccagaataaggggcgtttatcactcatttgtgttgcctgcctcaccacgctggtgtttggttacaaatccttctatagcaagggagaagctgccagccataattgtgcaggaccctgctcacaccgctctctcccggccgcgggcccagttcccaggctgtggaacacacagggggcaagctgagcccatcctgcccctgctccgtctcttcctcatccttattcttgtcactgggagacattcgtcactgagtggcctcagggacatggcatggtggtgacacaacccgacaagacaccagaaaccaaagcctcagtcaccaaggcccagggatgctctgatgtcaagggttggaacaaccgtgcaaatagctacttgcccacttccccaggacaaggaaaagaatactggggaaaaacattggctcctggttttaaatctctctgagtccccgaggggaaaaagaccatcatgcaggaaattcttcattttcaaaaccgtttggccaaccagcttttagctctgtgagcacactgggtttccattttttaaatctggttagaatcttctggtcgctctcccagcccccgccctcacggtgtgctggctgctcttagggaccaccatcctagacgtgccctggaaactcactcccagccttcaggggcttcactggaaacctccagggcagctcgtaccagcggcagccccttgcccaatcccatccccactggtgggtgggttctcccagctgctgcagaggggagtccagagccttgagactccgggtccctccctctctggagcagccaggcatgaagaaggtcctcaggtgctcctggctcccagcagggctgtgcctacccgaaagaaggcagcccgccttcccaggccctgcacttccctgacctggctgtggaggctgctctctgggaggagtgggtgctaaggggcttctccacccacccctccttcttgcctacagagggccggtggcctgttcggcaaccacgtcagctactaccaaagcgacggccggagcgccttcccccagaccttcaccactcagcgcccgctgcacatcaacaaggcgggcagcagccagggcgacactgagtcgccatcccacgagaagctggtggactccaccttcaccccgagcagctactcgtccaccggctccaacgccaacatcaacaacgccaacaacaccgccctgggtcgcctccctcgccccgccggctaccccagcacggtcagcactgtggagggccacgggccccccttgtcccctgccatccgggtgcaggaggtggcgtggaagctcagctccaacaggtaagtgggaggctggccaccccaggcggcacacagggcccacgtgctgcaaccctcaggagacagtggaggagacggaggcctcggccagccacttgtccctcaagcttccaggaggttgctgccccagactccagcaagagcaggaggcactatgctgtctcccaagtcctgcccttgatcagacctggcaggctcagggcaagtcagcagtggcctgcggcgctggttctcccacagggccctctcctctcccacacttcctgagtggcagaatgtgatcatcagatgtttgtgttccggcttcacaacagaaaccatcccgtctgcccttccccgagtctctgcccaaacctggcctttctcccagccgagatgggaatggtgtttccattgcttccctggagcccctttgccagcctcccggagagggcatcccctgtgggaggcgccatctgtagcactggcccattctgcccagcacaggatcattcctggaggtcttgactgtacctcttactcctgactcactcttttctccttgtcctctcatccctgtgctctaggatgcactgctgtgacatgctggatggtgggaccttccctcccgccctgggcccccgcagggctcctccctgtctgcatcagcagctccagggttccctggcggggctgagagaggacacaccctgcatcgtgcctggccacgcttcactgtgctgctcttccagagtaggagagtggctcccagcaggctgcacagccccccagcatgccaggttcttgacatgctcgccctccagctcagaaaataatagagaagtagcagcttccctctaaacccctggaaaagtgtccatccaaggagcaggcacacctgccgctggcctgcctgtccctgcagagggcccatttcaagagggctgcatgcaagcccatgggactcaggcatttaattgtgtcagacgacaggccagttaaaaggaccatctccctgtctgctttcctttctgcaaggttggctggtttagccacccagaagcagcactgggggcatccttcaattcatgaggcctgcactgctgccttctgtgtgcacagggcagtgtgctgggcactggattttatgtgccggcctgaagggctggctttgcataggagaggatctaatctaggcatctagtcttgggggcctgcacctgttgtgggggcctcatccttctctgcaacctcactccccttccacggcctttgaggacccaagtactgggtccccatacccccttctcccctctggcctcatgaagcttctgcttaaggagggctccacgtccgtctttagcatctcagggtgaactaattccccaccctctaagggcattttcatgtgaagctttgttctctgtgacataaggggagagggatgtttagaggagctgggggaggagaccccaggggatttccttgtccccacagatatatctctccacatagcaaaatacatgcaaagcacccggcacagtgcccagcacacagtcggtgctcatgaaatgtcggttccctctgcccactgcagatggtacaaacaacacacagggcatcaagcttcagcttggtgaagaggaggagcatagcccacgtcccagctcccttgtccccgtgtcacagctcaaggctaacggcagctctagtgccagcattgcttgtgctgaggatgggccagcacgtcctgtgcccggtggcccccaaaagtgctgctgcctgcctgctgctgctctgcgtctccagctcctccctccgtgcttcaccaaagcccactccacctccctcccctcccagtcctcctggagctcccacctctcatctttccttccactgcggggcgggtggcagtctgcagtcctcctcctcgagagagagaattgcttctaccctgcctgggatgctcagagccagggcactgatttagcactcggctctgagaggatggaccaggatctttctctgatgccctcaggggtctgaggataaagtgggcccagcatgcaaggtctatagaaagcaagacaaagggaggcactgagctgagctcagacaggaaaaggaagaggccttggtccagagctaaagatgacctgaccctgtcccagcagggaaaggcacgttccgatgtgtgaggatctggagctcaggagggattcaggctcagcagggactcaggctcactgccttctgctcaggagagcaaacccctctaggtgaggcttcctctctgtgcctttaccccagggtgccagtgtcagaatcaagggcaccatcaaaataagaggccaaggacttctcagctatgccaaatgccaaagacccaggtgtcatagctggaggtgagtggggggcagcctctaagttaggcagggcatatgtcattccaatttcatagggaaactgaggcatgaggtggaccaagtgacttggaccagagggtaagtggattggggtcaggactcctggatccacagcagacatccttctcccaaatgggaccctcaccctaatctgaacacttctatggatccatcagcaatcacaggagaacaaagcaccagcaactgtatgcctgttcacgtgtgtgtgcttgtgtttgtgcacgtgtgtacacctgcatgtgtgtgcgtgtgtgatgctttacttgctgaaggaagtggaggaaggttggcagtttctgatgtttttcttcatcttggatattgtaggtgccactcccgggagagccaggcagccatggcgggtcaggaggagacgtctcaggatgagacctatgaagtgaagatgaaccatgacacggaggcctgcagtgagcccagcctgctctccacagagatgtgagctctgctgccctctgctgaggctgacccaagtgtgggaacaaatgtggggaggcagaggcaggtccctgagatccctcctctggggctgattgcaggaggagaggagatcacagagaaaacatctgcaccgcctctttcatctcctcagtgaaatgggagccccccaacacacaacacacacaaacacacacacaccacacacacacacagacacacacaacacacacatacacgatgccctttttagcttggggtttcctcgccaggaaaatttctgaacattgttttataaacattgtaggctgtaagacacagtcataaatatattttctggtgagactcagtatgcacatacatatatagataattaaacaagtgtttcaagacactgcttataatgaagctgcccagaagagggcactggtggcaaagccaggcctgagatttttgtccttgctgccattcttagagtatttttagctgcagttctagatcctttagaaggtggtgacatccatttggtcactaatgactagcccttaaaagcaggtgcagcacagcacaatatcagaaactatcagaatgcgtcaaacgtcacaaaggtaagcgctgtgctgggaaacacttgcttaattgccaacagatgtggctatctgggggtctccttgagaaacatctttatgactctgagtcacatccacagaagtttgagacacagagtgacatccacagaagtttgagacacagtgtttccgaagcttttctggctcttttcaccctcaaagccctgtctcatctgttactgtatacatgactcacaacaggcctctgagacagagagggcatatgtcatttcaattttgtagaaagggaaattgaggcatggggttttccccagggggtaatgcctgggtcccatgggcttgcgtgcagccacttgaaaatgggccctctggagggacaggcaggccagcggcaggtgtgcctgctccttggatggacacttttccaggggtttagagagaagctcccacttctctattattttctgagctggagggcaggcatgtcaagaacctgggatgctggggggctgtgccacctgctgggagccactgtcccactctggaacggcagcacagtgaagcgtggccaggcacgatgcagggtgtgtcctctctcagccccgccagggaaccctggagctgccgatgcagacagggaggagccccacgggggcccagggcgggagggaagccctcaccgacccctcccagcatgtcagtccattcagttcctgaaaggacttcagagtgaggaaggactagccttgcaggcttttgaagacaggaaaggtgtggctggaggtggtgggaggggacaccaggtgccccaccctgaggagtgtggggagaatggcagccaggccagcacagcatgcggcttcctggggtccagtgctttctgctcgggaactggatgggaagagtagcagaagcacctccttttccccagcatagaaagaagaatcgagtgagtaaggaaaagcatggaaagagtcccaaccagcggcacttgacaaatcactcaactgccctgtgccttcgtgtccccatcagcaaaatgggacggtgggggtgacaggccttctacttttctgactcagtgaaacacggtcaatataaaaaagggaaatacctgaagctccttatgagataactgtctctaaattgattcttagagaatacaaacgaatgcctgaccacctaccctagaaatcaggaagagcatatattttaaactatttcggttattctagagtgcttggtgcaccaggcactctgctaggttgttaagaacccagtctccatcctcaaggaaattccacaaactaggaaactaagagggtctcaggagaggaagataacacagagtttctcactacccccagagtggtacaacccccaggggtacaggcgttcagagaaagttgagggcagggtgacctgaactggtaccacgcacaaggtgaaatggaagctggatctgcaagagccagggtgatttgcataagaagaaaatacaatagggaggccttagctagctgagagtaagagctagtcttgaaggtataaatactgcggtctgcactctaccagccttcctgcacatctataaatcatccaagtctctgtgctgtaccatgagcaggcatggagtcaccctcagaggtgtggggtggcaccagggaccagtgagtcagtggtctcatctgggaatgaggttggaatgcagctgtgcttcttgaactgcaggctgacccagcagagattgtgaatcaaaattttaataaaaatagaacagactaaagtggactgggactcaccagggtgcaacgcatgcaccgagggtaaccaaaggctatgaggtttcattccatcaggtgtgtctgtgcatgatgagaagctgtcaaatctacttctcatcgagtttccatcaaaggcctggaagccatagactagatgccccatgaggtccctcacagccctgctgttcacctactgagtgaccgtagagtggttgtaggcagctgcttatgtgctcttgctgatgagggggtggcagggcgggagaaatcgggggacgggcataagtttgggtgaaagttgagggtcactggggaaaacagcatcagctcatgcaaacacgggagccaaggccattccccaaaagaacttcatgggcctaggattctttccgctttctcaacacctttgaccccagagtgccttcactgccccaagtcagaactgcaggcttatgagacaggctgcgggtgaggagctggccattcccactgagcaggcctggaagacgtcaggggcaggccagaacttcttggggtggcaattccccaaacctgcatgtaagcacaaagtgtgcgtcccttcactaaggatcagagcaaagtgctttccgggggtgcagctgtccctgtgggtggccacttctcagcctccaggaacaagccccatgagctctctgttccaggctctcctaccaggatgacgaaaatcggcaactgacgctcccagaggaggacaagagggacatccggcaatctccgaagaggggtttcctccgctctgcctcactaggtaaatgcaccgctcgctctctggatgtggtcggcggttactccctagagaacactggtcagggatgattgggaaatcgttgtggcctgcctcaaatcagccccacacagtggggcatttccaaagcaaggagacaacattccaaaggcagggtgtgcagggatgagccctggacaccagaatacgtctcagacgaggggaggggaaaggaggagcgtctcgggccatagttactgctcctggcaccccaccagggtgtaaactgtcacaggccagtgccctgttttcctgccctgatggtggctctctggctggctttgcaggtcgaagggcctccttccacctggaatgtctgaagcgacagaaggaccgagggggagacatctctcagaagacagtcctgcccttgcatctggttcatcatcaggtagctcacacttttggacaggccactgtcacctgccagcaggccagacagtccccagggtgacggacaaatcctgaagacttcagtgggtcttgcctgtctcagatggctggcacgtcctgcccctgccctaagagccatccctgtagggcttcacactcctgtgcaggtgagggccacggcaaggtctgcagcatcgcaggtgggggcctaggaagtgctggtgcacaggagctctttgtgtgatcctgaggacccacagctgcaggttccacctgagctttcttcttaggctgccacagatgccactgacgcctctgacactggcctatgcctcagggcactcaggaagatgtacttgtacctagagtttgaatatacctggaaattttgccacacaaaaatccatccagtgacataaagaagtgattaaagaacccaccagcaacatggtcaagagtagggaatgacatccgtgggaagcaggtccagggagattccataaatgaaatgtctcttggcatggctgactccagctgagacagtgaaatccaagatgccaggaccaaacatgccttagtatctttgaacttcagtgttatctaaggccagtctattaaccccaggcaaactgaggtctaaacctgggtttcccaacattctgaccttattaaagttatactcttttatagcatggacctatgttttaaatagacctatgctttgtacccaaaggcattcaactgccaatcaaaagtcataatcagcatgagatggccagtgtggcctggctgagttgatagtacttcagctccaaaaaataaacaggttttcttagcctgtgtggtgttgtcttccactgggctttctgaaataatgaatatggccttacacttttctcagattcccagggacccaggagccccaggctgaggaccaccatgggcaggggcaggaggtggaaggatgtggggacactgtgtgtgctatcttaaaagatttctagaagtcgatttcacctatctgttcttgtcgtactggtaggcacgaaactctcctcttcatctctttctcctcctgtactctgtgaccctagaggtggtctttccccaccacagtgtcgctctctcccgggagcacatcccatcagagcagctcaccctgcagagcctctgccctggcaggttgtcatggcaacagccagacaggcctggtccctaccctcaggatgctcaagaatattcagggacagagggcgtaccgtgtgacttttttttttttttttttgagacagagttttgctcttgttgcccaggctggagtgcaatggcacgatctcggctcaccacaacctccacctcccgggttcaagtgattctcctgcctcagcctcccaagtagctgggattacaggcatgcaccaccatgcctggctaattttgcatttgtagtagagactgggttactccgtgttggtcaggctggtcttgaactcccgacctcaggtgatctgcccgccttggcctcccaaagtcctgggattacaggcatgagccactgctcccagccctgaatcttttaatcacaatacagcaccggatttaacaatggctcaaagacaacctgagctagagactggcagggcattatgaatggccccattaactgtgagaactaaaaccacaaatactggttttcccaactctttgtgaggtgcacagcgcttcttcacagacctcattgcgcttgagcctcacaccagccccacagggcagatggatagacagcattcgttttctggctttacagacatgcaggcctcaccctgctctccattctattgaggacaaaaccaagagcgagagaatgcacagctgacaggtgaccaggccagggctaaaagcaggttaccacgacttcacccaatcccagctttcagaagttacaggagaaagagatcacttcagacccagatgatcctaagatgtattttgagatagttgaaagtcatgccaggttgagataggaccgacaggggaaaataatggcatgggaataccaggcaggtggagctagctggacacagcagctgcaaagcagtgcttgctcagaagcaggggcctgccttgtttggggtcggccactcctattaactcacactccttgtgtgtccgcaggcattggcagtggcaggcctgagccccctcctccagagaagccattcccctgcctcattccctaggccttttgccaccccaccagccacacctggcagccgaggctggcccccacagcccgtccccaccctgcggcttgagggggtcgagtccagtgagaaactcaacagcagcttcccatccatccactgcggctcctgggctgagaccacccccggtggcgggggcagcagcgccgcccggagagtccggcccgtctccctcatggtgcccagccaggctggggccccagggaggcagttccacggcagtgccagcagcctggtggaagcggtaggtgactcgcagatgggcaggggggagaggccacgggcaacaaggggacttggcatgcggggctgagaagggagcacctggctcttgccaaattcattgcagtcaatatctgagcccgaaagaccctccctctcagggctgcaggagggctcgtgtgcggaaagccatgactgcacaagatgctatgggctctcttgaggctgggcccactgcagagggcggcagaaaccactgagcaacttatcccttatactgcagctgctcgacatgcaaatgtgagcctggctgcctttatacacagacaggcaagatccaaggtgctcaggcctgactgcccgtgagcatcacctggggagctttggaaacccgggacagattaactgatgattgttaaagctcttcgatgattttaacgtgtagcaaggttgagagccactagcctagaacaagcgagctttcagtcccactgtgctctgcctggtcagagcatctagtgcaatcccggcaccacattattagggacctttgacacactggaacaaacccaacagaggatgaccaggatggcaaggttcctagaaaccatttcctaggagaaccgtttcagggaattcgggaagaaaacctggagaggaggtgactttggagggtgcgatacacctctcacacctgcaacgggtgggatggggaaagggtggcaggctcagcccaccagcggacagatttcagctcacatggggaagaccttcccaaatgagctcttccaagatgagaggggcttgcctgaaaggtagtgagccccccatcatcagacatagccaagcagagactgtgctcatccgggcgtcaggctgtggtgcaggaggtggggcgttaaaccaggtggcttccaaggtttacctctcaaagtctggtattcctgtggcctcgatcatcctgcattcatttcacagaccttccctgagcgcctaccatgtgcaggccctgttctaggtacagggacacagctgagaaacagagcttctgctctcatgagctcacatcatggtgaggagagacagataataaacacatacatatataacacatcaggaaggtcaggagtgccaaagaaaaactaagcagggcaaggagagaatgagtggcgtgggcaaggagcaagacaaacagatgcctgaaaggagcgagtgccaggctgcactcagcttcccccgacccgctggctcaggagccgattttcccatagccaggcactaagcagccggtagggaggacagagaagcttaagggtcacctgctggcccttcccagcagaagcaaggcaggggcatgcgccgtgtttgcacagatacctcacccctggaaaggcagcagcaggcaatgggcagtgggcctgtctcagcagtttcaccagggagaatggtttctctgaaagaatagtataaaggttcagtgggtgtcagaaaggagagaggcaggctgggatctgctgatacagcatcagggcaaccccccggcccctctgagagccaaaccttctctggtttttgttttggttgttttttgagacagggtctcgctctgtcacccaggctggagtgtagtggtacaatcacagctcagtgcagcctggcgctgctggggtcaaatgatcctcccacctcagtctctggccttgctaagatcacaggtgtgcatcaccacacccagctaattattcttaaattttttgtagagacgaagtttccctgtgttgcctgggcctggtctcgaactcctgggctcaagcagtccttctgcctgggcttcccaaagtgctgggtgacaggtgtgagccaccgtgctgggccataagcaagtcttcatatatttgatgacagtgtttgaccaccccagccaaaacttctctggcctgcacatccctaattctggcagatgctccatctccacttgttccccatgggtgcccctcccaacacacacacgtacacgtgcacacacgcacacttccccaagtgacctaccagataccccctcgctctagccctcaagggaagagctgggctccaggagtaatgttcctttggttcttcatggctcccaccccgctccttcaggtcttgatttcagaaggactggggcagtttgctcaagatcccaagttcatcgaggtcaccacccaggagctggccgacgcctgcgacatgaccatagaggagatggagagcgcggccgacaacatcctcagcgggggcgccccacagagccccaatggcgccctcttaccctttgtgaactgcagggacgcggggcaggaccgagccgggggcgaagaggacgcgggctgtgtgcgcgcgcggggtcgaccgagtgaggaggagctccaggacagcagggtctacgtcagcagcctgtagtgggcgctgccagatgcgggcttttttttatttgtttcaatgttcctaatgggttcgtttcagaagtgcctcactgttctcgtgacctggagttaaccggaacagcgtcttcattcatttctgttgggaccagacgcggagcctgggtgcgcgagccgccctccgggaggaaggcgcccggctgcgtctgcagaggcggggagaggaggcggcgagggtcccggggcgcgaggaaggcgcctgccctctcccagctcgcaggccccgggcccggccgcgcctccgcggggagagcaccccggcttcccgcgcgccctcaccaaaaggaccctacagcaaacgggtgtctttcgactctgcttgtagaaaccatttgcacatattctgtacgagcctcgctgtctccctagagccagggccctgcggatttggagaagggagcggggcaggacttccaggaggaccccaacccggcccggagagggaggaggaggcctccaggggcgcggagctctggggatgggcgtcgggccggcagtggtgcggctcactccgtccctgcccacctgcgacgggatcccccgaccggcacgggccacgccgagctcccggccagccgccggcccgcaggcagcgcgagggaggagctgcgccgccggctccgcccaaccaggtggtgctgagcttccgctgagcgctcttttgttttgtggtttgacacttttcttgacagcatgttgcagtttcttttcggttttggttttttttaaatgttttattttgctttcccagcgggaggggaggaagaagagtgtttacaaagtcctgtagccccctcacctttctgttttcacttttgccaatgtacatcgggtttggttttcttgtattatttaaacggttgtggtttcctttttccacggaggttcaatagaagccgctgcaggagagttttaccaaccattgtgtatgcccaataatttgttatcatttccttaggtagtaacctatttttgttctggtttggttcggttatctaatggaaaggtaactggcaatgcacttgatgtggtcttgcacatgtgggtgatagagttgggttcctttttatgctgggtgtacaggtgggtttgggagagaggagcatgcgcgagagagtctccgagtgtgtgcgacgcgtgtgtgtgtggtgggttgtctgtgtgcatatgtcctgcccgtgtatatgcacccacaccatgtgcccgtgcacaccagtgactacgcagtcccccctttctggtttagctgtgggaagatctgaatctggggccgtttgaaagcaaaaacaaaccactgtctctgcttctgaaacgggaatcagtaactctttgcattttctgtcccacaagatatgcaaaaacaatgcaataatattcatttaaaaatacaattgtgagttgtgttggcattaaaactgtattttaaaaaaagacagaaatttaagggaaaaacacaagaaggcattttgcttcaatatattccgtgtaatgttttattgcattgataatgtttctgttgaagaaaccgttatacttgaattcaggtcagtttcagtatttttcaaatatttttttaaaactgaattgcaattgtgccaagcgaatataatgaattgaattaagttggttttcggattcacttcttgtatattttgctgcatgtaaagtaaatcattttgtatttggagtgtgacaagctttacctttgaactcaagtgcttttctatatgtggttgggggaaagggaacaagttttctttagtttgcacaatgagcaaaggtatcaccagtgtagtcattattctgctctccacaaacaggtttggacattactgttttgcatatcttgtgtttgcttacatttccctcaatttttccaaaatcgtttgctgggtatgtttgtaccgcctcttgctgtgagagaccaggacctattttattccagtcttcactctgtccactctgctctggtcatctgatttggtacttctccaagaacagcccttcactgtgaggtgcagggaggcgttctgatgagccctcagtcactgggccgtcatccgcatcccccatggaagaggtagctggctttcccttcccttccaccacacggaattttctctttggcttccttaggaaagtgtacactaaccgggaggataaaattaaagtcaggctgcttggagggaggggcatcctcacttccggattcttgttgctctacccaacaaggacagcaggggctcgagaaaggaactggtgaaaccctgatccatctgaaagtcaactctgcgtgctcctttctccatcccttcctcactctggagcagcctttccttcaggcttgccctaatgtttgggctgccggggagggggccaggacaagggaagaggcatccggagctcacagtgggggtgggaacagatttttgtgggggcatctctaatgctcacttatatctccctagaacatcactcttttggtgctgtgtccttcaaatgtatgtcaacagtggtggctgaaaagggactgctttggggaaaacaggacccaaccattcacccagaattgacccattaaatctcttccagtcctagtgttccctgagcccctcttggcacatatataagtaagctagaaattacaataagggacagtccattcctctatgacagcttgctggactgattcatgacaaagtggagaaatgtactcaatactccccggttaacacagtctagaaacagagtttctttatggatatccacacccaagtcatccaaactttcttgattccttttcactgccatcaaggtcctctagaaattgagtttaggtatcatcctttgaaaagttcccaagatttctaccaggaggtacacacaggcgttccctgtctagggcaggaggactatcctagcttgaccttctgatccactagaataagactggcgtatgatgcctgtcatcagaacagactggcacaagtagtgacatcaatgaaccacagcacaatcttccaagtgatgtctactctccacctaaaatggaattttccccatgaccttgtaaaacataattgtcacatcttccatacccctcctgacagcccccaagtgtcaggagaaaacagtcaggggctaagggcccaagggacttgaagaaacaacagtttaaggtctgcagtttggtcaacttaattcttgtcctccgaccagccctgcctctttcatttccagaccttggagaatttttcccagctttgattcagaaggtactagttataacccctttccttcttcttaatccaataggcctcactctcactgggaaatccactcaaaggaacaaggcaatgtctctcattctatttcccagttccaaattccaggtgcttgtctggagtgaagctacccgttactttctcccagcttttctccacccagcatgtctcctgcccatgcagctgaagacagtggggcaacctcaggagaagcagacctttccatgcccaagttcatctcctgagcaacagtgacacctagaaaatgaggactttggaagtcacccaaaagatggtggctactttatggagtcctgaagatacacagccaccactcctaaaggcaaagaaagaaaacacgaatgtaggtcagggatagagtggaaccctggtcatcggggtttttagcctcatcgtgggaaaggtggtaaaggaggatgatggcatctccatccctagaggccaagaattgaaatatcattgtcaaggattagaaacaattcagcaaagaggccacaaaaagggcctgctgactcccagaagacctctttaaaccccaggggaggcaaatacttgctgatggagtctgggccgtttccatattttaaagaagacctgcctctggggcaaatgtcagcacagagaggactgggaggagaatggaggcaagaaaagggcatattttgactccctctgtgcctcttcccagttcatggaaggatgtgttcagcttacccacccacagtgaccagtgtggtggagccgctgacatctcaaggatctatttgggaaggtgagaagagtactcattccatctgggggtgttgttccagccacatcagcctacctggtgggatgtgggggtgtctgccaccctgtcccccctctgctgatgtccctcccctcaggctgtccaggtgccacctgacacaggctgctgtgcaaagacaggcggggaagcccaaacctcactcccagggaggccctcagccgccagagtccaggttctccagaggctacgatttgaggaggttgagggggaagacaggagggaaagaaaagtcctacaactgtcaggaatggggcacctttccctgtccctaagcaaagctccctcttcccactgccctccccagccccagctccctgtcctccccaacacctagtgagaaagacggtgcgtggaagggagtcccatgggcagatgcttacacgacctctttgtgaagcctcttctgggtttaacttcattcatcaatttattcttatgtcaaagcaatgaaacttttctttctggagccagataccaatacaacaggtgaacgggtttctgccacatctctacattgacgggggatgcttgaacaacccccctcactacacagacacacaccgttaaggcacaagggctggggttgagctctagatgagggactttcctgctcctgcaagggtgagcactgtatacacagacaaggagggtgcagtagagtgactcccttggatggaagtagtaccatcagaacctactattattatgacataaattctatttacatacattgagagaatactacaatcaacactttttcctgggatgactttaagaggtttgagccacagcacctgaagtggcaaagatccatggtctttgtagggtattagagaactcttccagtcacctctgaaagcactctagatcttgcagctgagtggatgaagtgtaacaaatctgttgcacgctgagaggagtcagaattagcatttttcatgaaagttccccacgtctctactaagaatgaggaagaaaagactaagactaggtaattacacagaggcttgaaatgttacatcaccagagccaagtcctctcccttcagatcagttactggctgctacacagggacacccccaccttttcagggcatcccatgcactccacttctcaggatctaaggaatttgactttgtagggatcccagaaagggcactgtgccacttcccctggtgtgaatcagacatacattgtacattcatttctaaaattcactcatgcacctcaaaccaaggtcattatccaaaaaaaaaaaaaaaaagctctgggtggaagagtttgtaagttttaagagagggtcatttctatgtgaggaaatgcagaaatggacagaatgattcttattcactgtttgggtctggagaattcccattgtggaaatcttagagatctcaagtttattaccaagggaataaggaaaaaaaggtgagcaggcaccaggccaagcagtggctcccttgccaaggaacctgaggctgcaggtttcagggacccccttgaagaaacctctcctggccattggccaggagaaaagagaagtctctcctgtagagtcacaagagaagcaaaagagggtgggtcactgggtcctggacatagcccccaaccccaagacttcccaatatggagaaactacaccaatgtttaaaaggggaaaaggaaagaacttgtacatcaagggaagatgatttgtaaacacacagtcctgtgcagaaagatccccttcaggaggtgtctccagcatcccaaagctgtgcgcaccttctcttttcctgcctcaggccacctatgcatccagctgcagcccatacccacacctgaaatccatctcttgaatcccagccaggttatataccaccccattgccatgtcctgtcctggccagaatgcatgctgttcccccaagcctcgtgggagtgaggccatgggaaacagagatgagcatgtctggacaagtctgtgatggtagtggatgagaataacccatggcaaaacacgcacattcattaagaaatagggcgacagattccccgttggtgaagcactgaaaggtctattactctcataatattgctgttttattttaatccaccagagctaccatgcaaaactttcctcctgtgaaacgctccagataaagctcctctaatctccccttccctcatgtcctccagctcaaacccaccttcatcccccaaaccaatctgtatcatgcctgttatcagagaggcacagaaagatgggcagtgcctccgttgtcaccattccccacacccctacacacccccacaccctcccctccaggctccacgacttcacagtcttactgttgtaaatatcattgtacagtttgtaatcctcaaataatcccattgtcagaggcctcgcctgatgggccttctcaccctcgagaaaggccagggaatctagaaggggcaacccttcaaggagagcttcagggtcatctctgtgtgagacactattgtatattcctgtaagattgcatttttatctaaggaatgatgttatttaaaaaacaaacaaaaaacacaaaaaataagaattgcaaataaatttcttaacaatgtcta

SEQ ID NO: 462 - DNA, 90295 bp, Homo sapiens
  source 1..90295: mol_type = genomic DNA; note = NC_000010.11:71212570-71302864 UNC5B [organism=Homo sapiens] [GeneID=219699] [chromosome=10]
attgtggcaggcggctggggccggctagggcgccggagccgcacgcagccgcggggctccgagaggcgcgcactggggctgggactgcgcggcgccgccgctgcgagcgccactgagcggtcgcgcaacttcggaggcacagcgccggagccaggcgagcgctcagagacccggagccagaggggcgcgccggagcctcgttcgagagccggcgccaggcacccaccgcgctccgagtgccaggcggccctccgcgcagcgtggcttccgctgcccccacggaaggcacgggctggcgctgccgggcgccggggaggacggcgaggaggaggcggcggcggcggagacggcggcggcgagactggggccagggagacagccctgggggagaggcgcccgaaccaggccgcgggagcatgggggcccggagcggagctcggggcgcgctgctgctggcactgctgctctgctgggacccgaggctgagccaagcaggtaggaagcgatcgggtctgggggcgcggggctaggggacccttgcgcctcactctgtcctgaagttgaggtggtctttcgtcgcatcgatgcgcgcaggaaaagcggcaagggcgcccaagttagaatgtagattttactgcctcccaaagtgggcaatggcgcatccacatcgcgggagcggggagcagggaaggggcttcacagtaagctgaaaggtccctgctcgctcctgaaagggatcccttcttctccctggaaggggtgtaggagtcagggtctgagtctccgggaggatccgcctcctggggacgcccggctctccgcgcgcctggcatccgccccgaaaaagaacattggctacataagcaaggtgtgcgctcgctgccgtacgccggtaacttactagtctggtcccggctcgcctaggctcttacgcgctatagggacagcaatctgcagactagagggagagagcgaaaagacctgctgaacacaggaagcgcttcggtagcctcggcaggccggcttgcagggctcctgaagcggggagggctaagtcttgcacacatagctttccccgagatcgctgggcccgcaggtctggaagaattattattattattattattattattattattaattttctgagtgttggagagtgtgtgtgtgtgtgtgtgtgtgtgtgtgtgtgttggatgcgggtaggggttcttagcgatcctgcggagtttccttttaaattggtcactgacattctcgctgtccggggaacagactaggtgcgctctccttggtacagcgcccgctctggacccaccaagatgacttcagcgaactggtgggctccgaaataaagtccctaaccctcctctctcgccgtggatgaatacgtttctcgctcgtcctgtagctggacccggcgtcgctggctgggctgcgtcttctcggggaggctgtggactgaatggagccagcctctctctggtacccgaacccaagcaagtgggctggccacggctgccgggcggctcggctccggagccaggtggggacggggcctcctgcacggagtcctctctgagttgaggctgagaatggagcaggaaaactggagcagaaagtggacgagatgacgcagccctccccacctcctacctcctgctgcgaagttgacatccgcccttcccccctccatagccaaagattcctcattctggaattagtgattcccacggccaggagtgagggcttggctttagcacattccccacttttttttttttttctggtgcaagtcctgtgcagtagagttacaacactcaaccatttgatccaagttaattatgatttgggcagactctggtatttaaagcagtgttttgaagttggaaggtaatgatggggatggggaaggcaggctgctgaatgtccaaccttgttttaaagggtgcagttagacgtgggaggtgcttggttggggtgctggtttctggttggagggggtttgaggagatgattgaagggtagggtgaagtctctgtaaatggcacatgggcagggttgtgtcttgggaagctgcttttgtaccagcaggacagtgggatcaggaataaatacttaggttaccaggaatgaggggctgctgtaggagaaagacaagactggttggcctatagttctctgggtgggtgggcttggccaagaaggctgggggtggcctgcatttcctgcttaacaaagcatccagcccccaccttccccagaagaaaccccaggcccagggctttgatggatttgggcacgaatggtgcccagtcagaaatggcctctaatacccggctttgatttctcaccagcgagcagaagcggtgttggaattgtgctcattacttagtgcggcagtagctgcctgcccaccagcctggagaggggccaactggtggggtcggcctgcagccttctcattgcccagaatgtgtggcccttagaaacctgccttcaggagggagaacatgtcccttcctcccacacaatcttgtttttctctaatgccacaggcacagagcatcattctttcagaatgttctttgggtttttccattggatccttcacaagctccatttcactgatggggaaaatcaaggccagagtgttggctttctccaaatcttgccttcacttggccacagattgaagacatgtgaagggctcctgtccaatagccagactgattcaagcccagcagaccctccctcctattcttatccacccacccctctgccatgagactcataacagactgaggcaggcgaggctctctctgcaaagagggatctttactgggggtgtccaagctcccctcaagtggcaggcacctctctctccttttccccaccccaccccatccctggtgaatatgggaatgagctccctttacagcactgagaatatttttaagctgtaaagtctgatgctggagaaatcaaaactggaaccataaaaccccagacccttagaaggtaatgtcagcaagtgactagccagaaaaggccacttcaaaagctctggttggccctggaaatctcctcccaccccacctttcagcccttcctggagcttttaatgagcctttccatggcctctggctgggatggttgagaaggagtcgaggtgtcaagataatacttctttttaaggtgcaattaaaatcagagtttttgtagtgtctctgcttggtgtgtgtgtgtgtgtgtgtgtgtgtgtgtgtgtgtgctcgcgtgcatgcgcctgtgcacacacaatgatagcctgtccttgtctccctctgcactcactgtagcaaacacccatctcacttaaacaaatggaaaatcaagtgtcttaatgggttttctcattaaagtgaaagtaccactgcaggggaggaatttctcctgtaatctctctcctccacctctctcccctcccccacaaacagggaattctgtaggataaaacagttcccctcttttccaatccatttatttaactgttgacactttgggacaggccaacttgcccaaggtcacactgggactcaccggtagcgccaggacttgaactgaggcctcacaacctcaatctagtgcttctagctccttcattccatctgggctggagacccaccatcatgggtgtgggcttgagactctgaaattgaggcaccacttaaggcaggcagctaaagataagatcgctttgatggctgctttagactggaactcatggcaggatggaggaaagaggttgagagttggaagggtgaagaggtgttccaggagagggggaacagggcagagccaaaggtcaggagtgaagctctgagaccaggcaagtgcccaaaggtggctcccccaacccccagcattggcctcctgagcaactgccctgacctggggaagggagacaggtcacaagccaagctcccttgggctgcatggccaaataaacattagcattttatagctctgcacccatttgtagagttggggacagaatatgtttttactttttacttatattcaaagctttaggagccagtgccctcccccacctttgttgttgagtttctcctggaccgcaggtctagtgacccttttcctgggtgtcaggcttaagacgaggtctgcctcctacgccccattccctgagccacagaggttttctaaggaggtttgtgggctgcctaagactttggggatgggctggggggagatggatcatttccattccaagtgctctcggaccaggttagtgattctgaatagacagtgctggtacctccctcccccagggcctgcaggcagcccgtcttttgaccctcagagttggggttgggtggaaaggagacagtttggaggccactgccgccttcaggaaagggcagagggggctgggtcataggctgggacttgggggtgggagcctgggcccagggaaactgctgcctgggcagatggcccccagagggtagggaggagaaagccggcgctcaggccagagctggcgcttctcttggcgtcctcctccttctcctcctcaccagtttcctaaacagcttccacaaatagagtcattaaagctgtgaaggcaaaatgaaaccaaacaagtgcgttctgtgcttttctgtttcttatttttttaaggaaattaaaaataccgtaattagaataatacaaggagagaacactttgcggaaggcctagggtaagggcacttcccacccactgggttggctcaagaggttgggactggggcgccacctcccgcccccttagggtctgcgatccgccgggggcgccgcgggcttttccgccggctccatgcatttccctgaggcaggatctttttgggggaagctggcatcccggcgctggcctcggcccccgactgggagttgggtggcgcttgattggaactccggcccggagccgcctcagccgctgcgcccccgcgggcagacaagcccgggcggagcgcgctaagccacaggtccccgcggcgttcctcccggtcttcggggatgctaatggcagcgaaaatatttgctgaagtgcaggcataaatcagccgcctccccgctcccccacccccaccccttttgtttcctcttccttctctccaaaagcgctgggctgctgggcgccagaatttaccttttccatcttagcggcctgattagcatcgccgccgcttgtggggctggattctaccctctcctgcgtcccccacccccagtccccatctccacctccctccccagccgagctaaatcggtctgcggagccccgggagctctaacgccaccgcctagcgagtgagtgcacggagccgccctccttctcacctcccagaacaggctgcccccagtgcttgcaacttaccccttcgcggcgctgcacggctcggctcacttctccaagaaggcaggcttgtgggtgtgagagtatgtattaaggagtgtgtggggggtgagaatgtgtattaagcaggtgggcggaggtgggagtttgcagggaggggagggtgggtgtggtgttgcactggggtgtcaggtgtgtgtgggggcgaggcatggactgggtgtgtgccggaggatggatgtgtgtttgaggagggttgtgccttttgtaactcaggaggtgtgatgtataggctgtgtctgtgtttgggtgtgtgtggggtgggcaatgtcacatgggcacacttgtggtgtgtttgtgtataaataggtatgtgtaatgtggagacagtgagtcaccaccaggcatgggaagctccatccattgtattccgttggggattccacttcaggatgggacccaggccatttgcccatcagcacttaagagacctcattttgccccacacctgcactgtgagcagggtttggcctgagtgccaggttctgctgttggaagggcagaggacagcttcccctgctgagtgcagatgggataggcctgcctgcaggtgggtcctggtgctccagggggaggaaggttggcagagatggaccctaagccagcccagcagcttgggctactgcccccaggaagatcagagtcccagacctggagtcttctgcagtcaactcccagcttccccagagcatgggagcggctgtggtttggagatctgctctctgacctgggtcagcttatgcttcagcctgtctcccccaaagggagtgagttctcctctagagtttgctggagaaggggccagcagagcttgagtgggtgggatccccagtggagaaccccatctcaggctgacgtggctggggcctgggactctcagcggtagcaatttaaagaggacagacacacccacacacatgctggactccactgtcgttacaactttcttggtcacagaagcgcttacctgctttcccagggctgtccacaggaaggacttccatcacttcaactctaggataagatggactgttctggagcagggaggcctataggaaaatcacagtccctcgccccaccctggtgtgcatgttgctttacagtttacaaaacccttttatatgtgcagtctcactttgtccttgtaagaactcaccgagaaggtggaagctctcacttagaaggctgaagagacaggactgggacccaggtttgtattagtcagggttctctagagggaaagaactaatatatatataaaggagagtttagtaagtattaactcacacgatcacaaggtcccacaataggccttctgctggctgaggagcaaggagagccagtccgagttccaaaaccgaagaacttctagtctgatgttcgagggcagaaagcatccagcacgggagaaagatgtaggctgggaggctaggccagtctctcttttcacgtttttctgtctgcttatattctagccctgctggcagctgattagattgtgcccacccagattaagggtgggcctgcctttcccagcccactgactcaaatgttaatctcctttggcaacaccctcacagacacacccaggatcaatactttgcatccttccatccaatcaagttgacactcagtattaaccatcacaaggtcagaactcctaagcagccctggccacagccctcgaggaggtgctgtctgtaagtgttgctgatgtccactctagaaatgttaagtggcattcagagcattgcagatgccatgtgagggtgacagatgatatgcagggaagagcatagcagagccaaggttttaaggcatggggcttcctggggcaggtgatgagtgccagaccttgactgtccttttccagttcttctgagagcatgtcctgaagagaggatgggatgggggctagctagctgggtatgtgggcaggggtgccagccgacctctccttactcttgggaaatttgcccctgttagcatctgctgtgttcactatcttgaggtggacaccaatccttggagaacaaaccctctggccccattccacctcccagcatcccaggttctactgaatgtgtgcgcttgggtcacgaaccctctcagctgcttctgactctgtgggctaggaccatggcaggccctggaggcaaaaggccttcttcttggatctctctgtatggctcccaaaggtggaacgagcccagaaaatactttctaagcactggtagggatcatattgggggtggagacatggggaggtatctccctactttctgccctgcccccaccagagaacacaaagtgggtaagaaggggaaggatggaatctgcctagcacttctgtgagccatttggcaggggtaggggtggggagatcctttgtcatcaccacctctgggaacccccagctgctctctttccacacacacctctccccggggccttagctgcgggtgcagaagagtgcatggcattgccaattggaattctaaggaggttaacacggcctcccagcattgtcactgactaacttggtgacgttgggcagctcacctaactggactgtacctccattttctcatctgtaaaatgggggtaataataacatcatcctcagaattgccttgagagtctcatgagctgatgtatggtaaagcccttagcacagtgcccggcacacagtgatcactcagggcctgttggcatgcagcctgccccggagagagcctagcaatgcatcatcatcttcctccacgggagtgaaagctgggaggtcaggaccaggagtctcagctgctcctggctgaggagttagtagactctggctcttgattttcatttgctgtgagaccctaggcaagtgcctttccctctctgggttctgattgtttggtttcccttcccatctgtaagtccggagtggggcagaggtggaaggatgatccatacaggatgtggggtttttgtctggttctatctgaagaggctccagcagtcagaaagaaacagaggtagccgaggtccagaaccacttgtgtttacagaggcccctctggaaagtcagtatattgactggaatgcccttgcacgcattatgcagccctgggtgtctctctcaccgaagccataaatcaccctctgggaactcggtccctttttcctgctccataagcatttcctgcttcagaaactgagaaccccagatgccaagcagggcccaggaggtagagaagggccccactggcagaggcagcctgggcatgtgcgagaaggggcctgtggtccccccccttgtcacccactccgaagctcaagtgcgccctgctgagggtgttagagacagactttgcaggcctggcccccgtgtcatgcatagcttcatttctcagaggcagggggaggccaatcttgggggttggggaatgaggactcctgtctccatgtagggtatcagaacaccagcccaccctaaaacctgatgcacatgcccattcattcagcctgagcaagtgctgagctccgcagtcagaagcttaaaaaccatgggcctgactcttgaagaactgatgggctttgtgctgcttcttgaagcatgggccaagtgcctggcctgtgatgctggggtgcaagggggattaggatgatgcaacagatatgaatcattcaagcatgagccaagatgtgtgtgtcttgggaggggtcttgcgcgatgtttagagggcaggctgtgcagtcacattacttgggttcaaatcctggcagtgccaccatctggctgtgtgtcttagagcaagttgcttaccctctctgagcttagttctgagcttagttccttcatttgtaaaatgggagtagtaacagcaccaatctcattagatttggggataaatgagatcatgcttaaaagtgtgttgcatattctgaagtgctcagtgacattcactactgtcatcatcatcatcatcatcatcatcatcatatgggcaccatgtattgcgtggaacgaagggaaatgtctggatgttgagaggaagaagctcttgtggtctgggcagtcagaaaaggcttcctggaagagggaaggtttgcacttgactggcccttgaaagatgagagactttgggtaaatggagagtgtggccctggtaggggatgtgtacgtgaaggtatgggtgtgaatgtctggcacatctacccaggagacaaattctacattcagcttctgactcgtgtctgatcatctagcaactcaagacttctagggccagaggtctcttagtggaaagagccccagcctttaggatttgaatcttccagaggtggctcactctctgtgcctcagcttcccaattcatgagataggcatgattccaccaccttcaccaggtgctgatgtgacgtgaacacacacatatacagtcttggcagagtgggtgctctgtggatttccattgccttcccttctcttcctgcccctcctccaccccccgatttggctgacctctggatagggctagggctgggcctgggccctgattctctccctgtgcatctctgggcagaacagtgggacagagagtcccaaagtggcagtttccaggttggccagagagccaaggagaggggcaggaagagagaggctgctttttctggtccctggtgttcacctgggcctgccctgacccaggaggcatccccagggagtcttctgctgagatcacccaggagcctgcaacccccagaggccccaagcggcatctggaggcattactgccttcaggagacaaagcccaaaggaaagcagctctgtaatgcgatcagaggcgtccgcctgcctggctggggacctggacacccatgcaggatgcagagcttacaagaaattgagtcaggaattccaggaaagttgtccctgaccccctcccccatccctatcccacctttggtcattctgtgacacagcagagcagagtgacattcggagtgagcagtgacctgtggtgggatgggagtctgtcggatggggcagcctgcgttctttccttttccttgtcaccaagccagggctccagggttggggagacaggttcagcaggggcagccagcatggattgaaacgactaggtgatggcagagcagccatggcactaggtgactagggaggctgggcctgatttggctcactcgtgtggattcctggcacccagaaggtactgaataaatctctgtagaatggatgaatgagaactcatggtcaggccttactcacccgagaagtagctgtgattttgtcccagctgtgcgtggacctgctgctgtggatgagtaaccaaagaattagaagattttttcattcctttgcttccagccttcccctcctgcctgcctgcttccctcccttcattatctgctgcttgctttctttgagcacttactgtgtacccaacatggtggaagccagagccaaatcttcagtgatcagagcccctaggtaggaaggaatttattcactaaatccagcggagccacagagaattaaccaagttttgcagtcaagtgccctgggcccctttacatagagaaagtagactggcagacacttgctgggctggtaaattttgtacttatctgcaaggtggcccttgtaaggcacagctggtccaggcgactttaaaatgtttctttcctacttgtagccacaagcccattatcacttctccccaccttgccttcttgtggctcaagagaatgcttaccgcatggacaactggccgtgaggcctgagagcaagtgtgggctgagcaggtgtatctaaaggccatggccagatctgactccaggcctcagccctctatagcaactgctaccagcttcttagcaggagctgggcttggtgcaggagagcagttctggccatggggtctggctgatatagactctgggtggcatcatgtccagtactgacatctttgggagattaaacatccccaggcagcaacaagcctggcccagtgaccatcctcagctggtggctcactggtccttgtcaggagtccctgccagaggctgatctggaattcctccctggcagcccaggaaagccggggctgctgggcacagtgacccctgctgcaaatttgatccagccccacattttcctcctggtccatcccacttctgtatgtagacacagacacagacacacacacacagacacacacacacacaccaggaaagccggggctgctgggcacagtgacccctgctgcaaatttgatccagccccacattttcctcctggtccatcccacttctgtatgtagacacacacacacacacacacacacacacacacacacacacacacacacacacgaaatgacagcagaaaaagccccaagttgaggattgggaaaactggattcttttttttctttttttggaaataaaaaactggattctaatcctagccatgtagctaatctgctttgtgacattgggccagtccttttccctctctgagcttcctctgtccaaatgaagaggttctgccctggaatcagaaaacctggattcaagtcctggccccatcactaactgcaatttcatgagcctccatctcctcactataaactgggcccccaattggttgtggggacattaaaggaaatgggcatggtcagtgaaggtcggttttctttcctttccacccagaaggaaatccacaaattgctggatcctgccttctagtgggattttggattgctggatcccaaatccacagagcccgccttctttctttctgatattgccttcttgacatgggcatattagacataaggtacagtagggttatcctacagacttctgagataccttccagccttcaaagcccatcgctgtaaagcaccgtggatacagttcaggaagtcctgtggggtgacttggtaatcgtctgagggttatcagcgaggggagagcctgccttgttatacacatttgggagagcctgccttgttagacacatttggaaagagcactggactaggagtctggaatctccagctctaaggccaaatctgtctctgtgtgatacgcaaatctcacccaccttctttgagcctcagtttacccatcagcaaaaggaacaaaagaagttgaatgccaggtagggccaagtgagaaaacacccagagaggtgcttcagaaactgttctccaaacccacgggggtcgctgatctgaggcagcaggaggcctgcagaacagtccctggactatgcggtgcatcctgggaactgctgcctgtgtggcagggatgagagggcccacgtgcccatttccctggcacctcccatgcctggctggccacagctgttgagctaagtgacaagagttttagccacttctcatccatctttgtgcccccataccctgaccccattgcacaccccacatcccagagcggaggaggcccgggtgccacgtcagagaaggttagtgtcagtgctgggtttgatactgtctgagccagcacaccatctgccatgcccaccagaagttacataatccctcggccggctgcccattcttagaaaacggggcaggcaggaccagcagggagtagagagttagagttttcttctctgcattttgttccctcccagcccaccacatccctggaccagtcttcactctctgagttgctcccacactgttcagagcctgagacgtaagtgccaaggcagagagaagctcaagttggaaggggacatgggtcttgaggactgcttgccaccgtgccacacagacttgaggacaccctgcagacactacctgctggcagcacacctggctggccacaccttgccagcccctcacacggctcctctgctgagcctgtggtgggttgaggaggaccactcaagcttctaggacaaatagagtctcctcctccccaccccctagttcctacagagatattatctttccaaaatcttatcagatcataagcgtttttatttatttttatttattttattttttatttttgagactgagtcttgctctatcacccaggctggagtgcagtggcaccatctcggctcactgcaatctctgcctcccaggttcaagtgattctcatgcctcagcctctcaagtagctgggattacaggcgcccgccaccacactcggctaatttttgtatttttagtagagatggggtttcaccaagttggccaggctggtctcaaactcctgacctcaagtgatccgcttgcctcggcctcccaaagtgctgggattacgggcatgagccacctcgcccagcccataagcatttttaataactgaataacagccagataacaccacccatgtatcattagggtctttggaatcactgagacccaagatcccatcctgtctccttcatttgctggctgcatgatgtttgccaggcaacttcactcttgttagtcccggtttcctcatcagtgaagtgggaatcatgaagcctgcttcccagagctgccttaaggatggaatcagataatacttggagaggatggagaaagtatttagtgatggtagctctgatcagcagcatccaattccattctctctttttaacatcatgaccagatctgatttattgcaggaatgcaagagtggttccaaatgaattcgctaatattaataacatgccatattaatatcatgttccatattaatgaatctgaggaaacaaaatcatattattatcttcatagatgctgaacaaagcttggataaaatactacactaaaagaaataggaattaagggatacttttcagatgagatagatagatatatataccatggaatactactcagtcataaaaaggaatgaaataatggcattcacagcaacctggatggagttggagaccattcttctttttttttttttttccttgaaacggagtcttgctctgttgcccaggctggagttcaatggcacaaaattggctcactacaacctccgcctcctgggttcaagcaattctcctgcctcagcctcccgagtagctggaattagaggtgtgtgccaccatgcccagctaatttttgtatttttagtagagacggggtttcaccatgttggccaggctggtctcgaactcctgacctcaggtgatctgcccgcctcagcctctcaaagtgctgggattacaggtgtgagccatcgcacccagccagagaccattattctaagtgaagtaactcaggaatggaaaactaaaaatcatatgttctcacttgtaagtgggagctaagctatgaggatgcaaaagcataagaatgatataatggactttagggagatgggggaaatgtgggagggggtgagggataaaagactacacattgggtacagtgtgcattgcttatgtgatgggttcatcaaaatctcagaaatcaccactaaataacttattatccatgtaaccaaataccacctgttcccaaaaactattgaaacaaaataaaaataaaaataaattttgtatacatacatatatacatatatatacatatatacatatatatacacatatacatatatatacatatatatacacatatatacatatatatacacatatatatacacacatatacacacacacacacacacacacacacacacacacacacatacataccctagtcctaaagctggtatcttatttaatggggaaacactaaaggtactttcagtaagatcagtaatagataccctgctggtattcacctctgctagtattcaccgctagaggtattagcaaatgtgattaaatgagagaagtcaattagaagcattagaaaggggtaaagaagaagtaaaactattcctgccagatagtaaaacatactggaaagcctctgtaattaaaacagtgtgcttactggtgtgtgaattggcaaatagaccaaagataatagtaagttcagaattagacccaaatgtctacggaaatacagtacataacaaaggtggtatcacaggtcactggggttaagacagactttttaataaatggtgctcggactactgggtagctatgtgggaaaaggtgaaatttgattcaagtctcacaccatacagagagatgaactccaagtggatttgggatctagatgtaaacaatgatacaactactaaatgaaaacatgggtaaattcctttttaaacttgtgggtgggaaaggctttctaactatgacttaagatctagaggcaataaaataaaaaaactgatcagttttattacatgaacatttttaaattttcgacaaaaaaaaaaatcacagaacaccttaaacaaagtcagaagacaaagtacttgacaaactgagagaaatattcctaacatatgccacagacgaagggctgatatttatggtatataaagtgcttttaaatatcaaggaacaaaggatcaagccctcacagaaaggtggaagaaaaagacacggacagacaatgcacaaaataaaatagaacaatgaccctcgaacagacttactcagaattagataaacacatattgtaaaacaactacaagataccatttctcatttaccagacgggaaaacatgaaacactgtggcctcacattcagttgtggagggggcttgagcacccgaggggcacccacggggcctcctctgtgcccaccttggccattgtgtatgcattgtctcactcagtccttgcgatggctctgggaggaaggtcttagcagaagagcaaactggggctcaggaaagtgaagtgacccaccctaatctagcttttagtgtcagggcctcatctgggttcagccctagcctttggactccagattcggtgctccttccatgagcccaccctacacccactccccaaggcagggactgggccttatcccctgcgcacctccctcaatgcccagggagtgctggatgctctggagttgcctgtggagtgactgggcggtgagggaatcgaacttggagctgctttataaaatgcagactcctccaccaacgtgattgttgtctcgctaaagagctgttgattgatggacggaactggcactttcccacaggccagtcagccagcctcagtcagcccctttcccattttaaggattggtcagagagagtgggtgtttgtgggtgcatggggagcaacaagccccaggggcagatcagctggtctgctggaaaagaggctgagccagacctcagctcctatagagagcagaggagaccctgggaggatggtgggggcatgattgccggaaggtcctgctccaagcctgagaattctgctttccagtcagtaagttgtttattacacccttgacagtgtcctcctccgcccctgcccctggatcctgaggagcctgcagagggcggggcagggcctgctgagggtctgacctctcaagggaaaggggtcgctggaagcgtggatcaagccatccaccctccttcccatcacggcccactggaccagagcgcttgcccgagctcccggaggccctgatctctgctggaagggcaggctaaacagaaattccctgggaccttggggcatctccctctcacttccctggacttcctttccaaggctccttctagggagttgttgtgcttctggggcagggcgtgtagttctcagagcttcttaggaaccgcagtcttgcagaccctataaaggggtgcatgagggccccgtgtcccttggcttgagtaagagctggtggtgagaatcagccccatgccatctctggctgtcccaccgtcgctggtcagggtgatgcctgttgctcccaggcacagagcgcggcatgcagaaacaccctcttattgactctgagcttctcaagagccccacgaagtcatcagggggagtgttttcactgcccttttatggctgggcaaactgagacagagctacctcctgacctacactgttatcatctgacttttcacccctacctcctcctctctgctcttgccttggtttggtagctgagaaagattaagaaaagaagcattgtagaccattctagatagtccttcaaggacaccctgtcttacctccatgttttccctaggggaactcagctgtgattaggaggaacctgagggccctcactctgattggtcagagtgaggaggggtgcaggcctgtttgggagccaggaacttacctccactccatggctcagcgagggaagctgctgacccctgaacacacagagaagccaaggccaagcaggttgaagacaggcagtccctagcctctagccctcctggctataccacaaacgtggacatcagactgagcagagcaggccagtggccaaggtcaaaattgctttcaatgtcctgtccaccaagtgacctgtggacctagcctgcctctctggggagggacattccaaagacaaccagccaccttctctctgccctccccacctcatcaggcctccggccctgggtatgtgggcctccccccacatccctggagcctggcacagcctccctttggatactcaccatgggtggacagctgggaccagccttccccataagggaaattctagatcccaccaaattccaaattccatggccttatctggcaccattctgtctggcctttcatgggtttccttgtgtgggaggaaggacctcccgcccacagaaagattatggggcagggaagcagggaagtgggggttccccaccttcccaccactcaagctccctggatgtgtcacagacttgtaccatggctggaacacacaggttgtttatatggagagcagccaggaacagggatttggggtgtggctgggggtaaagacaatgggcttgacagcagcaagccacctccatggtgaagtcattgtcccatttaaccctgtcagagcagagatgctacagcaaggcaaatcacttcctctctctgagcctcagtttccctgtctgttaaatgagggggttggactagtgaaccataggattccttatatgaaagctatataagctgtgcatcgtaaagtccccttagcccagcagcctatagaatttcctgaggggcagaaggtgccattgtgacacccactggcctcttccaagcatttcctgctgggcaccctaaaaatacagtaggggtgaggtgggggttggcgagagtatgggctcggccattgctagagtcgtcatttcacacatcagcaaacgtgcctctggagggagtgctctcgcactgagcttggcgtggctggctccttgtcatccaggtctcggctccaatggcccctccccagagagtcctttcctggccccctgcctcttttactcttcttccagcacttcttgccatctggaatggttgtttgaatacagacttatgtgttgactccccagcctgggagcgcagggctgtgtacgctcagcaatgtaccctaaatgctcagaacggtgcccagcacacggtgggcccttgtgaacaggtgcttagcaaacgaaaaaccacaatcgtacgtaaaaatcttaagagttttttttttttaatgcacatgcctggcctttaccctaaaggttctggtttagggactgtgggccaggtttgggcatatgaattttgacaaaacaccccaggtgattctgtggcacacttatgttaaaaagagactagcttggtcattctcaaccttagctggacaatgggatcacctggcacctaggtcccacccagagatcctgacttaattggtcttgggttctggcctggccgtcaggatctttaaaagtcccccaggtggtcctcttgtgtagctgaggtagaggaccctggaacctgaggatctccaaggcctctctgatccaaaattctgcattcttggaaagccctgcaaggttaagccacttgttccacacagcaaactgaattctcaaatggggaaacctccttgttgaaccctcctgcaaagatgaagaaagggataccctttttgaccctcatagatgagttgaaagcattgccagaagccttgtggcccatctccgatgactgcccaggaactcccaggaatggcctgtggctctgtgcacagccccccagcacctccttttcctggcaagccagctgagctgtgtcaaaacctatctcatctcctcctctgatagcacacagttttaaataagatcttcatttaccagaagttcacaccaccgcgtatgtgttatatgagaagtagcaatcttgtgttcatgagggaaatgcagtcagggagggtggaggagagccgattgcagagggagtgcacaaggagggaggaactcgtggaacctgagctggtggcccagccccggccccagccccagccctggcagtgccatgctcctcttggctcagcacggggctggagggggaggggctcccactttgcaagctgacctcagctgctggaaggcttggagcaaatgggcatgtgatgtcaccgtgagctccgccagttggcagccctggccttgctttgggtcatttacatgtcttcagttggttaagaaggagctcttactgccgatttattagttgccgcctgcctagccttggtagctgtgataaggaaggggtttaggggccatggatggatgccagtcccccatggccatgctgcctcacttcccagcacagcctgccatgcagcatgtcagtgaataaaccaattccagtaggatggggcttgacagtttccagggtgttctcatgcagtcctcccaaccactctgtgagatgggcatgattaccttgctcgtggagaggaagaaaccaaagctcagggagcttgagtgccttgtacacaaagctgcgaccttactccaggatttctgccagctgtgtctgcacctgatgggggacttgtgggcaggtcgctgtccctctgaatgtggtctgcagtatttctacttccacagcacttgtccattctgatggcctaaatgccaagagaacagggatcaaggaccagtgtgccctgtgaccttgagcaaggttgtttctgcctcagacctcaattttcccaaaggtaaagcaagagttggactgggtggtcttccaggaaggtaggacccctcggcttttcgttgcaggttttcaagtgtgtcctagcaccgaggagatgaggatcctgaggtggccccatcccggggtcctgaggtggccccatcacggggtccacagtacaaggtcaatgcacttgtaataaatattgagccaaccaatgctgagccgcatccctagcctctgaataaataaaatgttgcccagaataacagcccggaagatgctggcggcttcagccagctctcacctttgcctctcccactggccaagcctgtcacccgtccctatactcccttgtctcccccttccctctgcctccccactccacggtccatcactctagctccagaggtggccaccgtcccagcctggctttagtttctagctctgcagcctgcatctccctctcccagcccctcagctgccacagcagttaatgaggaccaacccctacagatggcagctgggagacaggccagccaggttctggtggggctggggtggggcacagggaactggaggtggggcacaggggagtgtgcctttaatccccagcaccagacagaagcctttccttctttgtcaggacccttgctggcatttcctcctgcagcccatccctgggagatgaactggtccaactcctgcaggaggccagcccactctaactgctcttggctgaggccgccaggagattagaaacagggtccacaaaggaacctggtcccagggtgctccaggccacacaggcacacttgatttgatgcttctctgcctgatgagtgtgcaagtacagttatatgtgttatatggctcccttctttttacggttcaagtttctcaggggcagagccggttaggtcaagtgtgaagttacaaaatgttagcactgaagagatatcttcctcattttatagatgaggaaattaacctcgggggtggggggcggagataaggacacttgcccagggtcacacagccaggaagcagcaaaagagcctggatttggagcctgattagggcctgtgcccttggcccgcacttgacaccgccccctccaggggcttttgctggggccctcacggagatgaggcttcattcttgagattcaggcctggcccagagaagtccaagccagggaatcgaagcttcttggtcccaaggtttatggactgccctggggaaacagtaccccatcggaaaacctgctctctgctctatgaaaaggaccttcaccatgttgtggggtttcactgaaaagtattctggggaccagcataagaagcaaagccccttgtatgaccttcctttggtctgtcaagctgtgtgagaaccagcagggagcccctggggtgggaagctcaaagccccaggcagaacacaccttccctttgcaaggcactttctagatggaatccctggggagaagcctaatagctcagtgcaagaggcgtgtggggtttcatccccattctacaggtgagagcacctagatgcagctagaatacttggccagagtcttgtggctaagacagttccccagccagttccaggctgctgggtctgggggccctgctgccttgttaggaacttgggagacttggaaacctgggcctctcttcctctgctctatttgcagaggtcccagggtcattctgaacacatcagggagactcatcctaaaagctgggttgaggggacaggatttggcatccagatcccctccccagcaggccagatagattcccactggtctcctggcccagaaggagaggccagcccttcccacccccagcgcccaggggggcccctcctcccccggcctggctgcaatgccgggcccctattgcaggactcgctgccgctgcctctgactctgcctctgcctctgcctctgcctctgacagacatcccgccccagaagataaggatcctgtctggcgccggagtgctttttttcctccttctttccaaatctgttccctgattatctgcagacagcccctcgctaggggagccaccagggaaggggcccagaccacagagaaagacaggaggggtgggactaacaggcctgcagccaccagcccttctgaacccctctgggggcttgatggtcatttgctgagcccccactgtagccagagccctgaactcagcagagagctgaggactggtttccctgggtgggactgacccacttcagcgggaagaagagggtatgtggactggaggttgtgccagcgtgggctgggatggggacagagggtggggttccttccgtggtcagcgttcctcagccttgggcctggagagcacccagaggggatgtggtagaggcttcagccagccagacggccacatcctgtgggagacattggcccttcccaggccagacggtgggaggacacttagggactggtaggggggtcctagggggttcccggagcccagcctccagccctgaggactgagcttagagaatggccagggctggtgtggcctcttggcctcaacctgaaaaggaagggcagctccccaccaactgggcttcagaccaggcaccattgtggaattccagccttagagtgcccaagccgctgagagccctagagagcacctggtcgcatctgggccatctatagacagagggacccatgtggaaggcaaagggatcatccccacctcgcccactggcatgtcaggagcctgcagcatgggtcctactgccctgggagctgggagccctagttcaggtccacactctgccactaatacgctgtgtgacgttaggcaagttcctttccatctctgggtctcactcgtcaactgtaaactgaaggggccttctggtcggggcaggagggaacagtggagatctgagtccaaagacctttccaaactttgtcaaactcctcagggttgttgtaagattcaatgagatattgaaggtgacaccttggcttacagtaggtgccccataagtatgagtatgtccagcccttgacagctcagactagggacctcaggactgggcaaagcctgggcagttgagttcccctctgtgagaatgtgcttgtgtagccttagagaaagaccctacaccttccctgcccccagcatcccttgccatgcccgccctgcctcacctaaaacatgtgggggaagggaagcaatgcaagatcattttttatggcttcctggccctggagccagagggctgaggatcgggtggtgtgggccggattcctgagccccccttcagagccagctcgtaaatatgaagccggggcagggaggagctggctgttaagctgtcagcagaggcccatttagaaagtcgtaaagcgtttctcagagctcctcagagctgggacccagggccctcccgccccacactgaccggcagtggcctcctcattcatgggtgctgggcttccctgcccgagcccccactggagactccctggctcttgccattagctgtgccttggtttcctctctgtgcaaaggaagtctgctctgcttctcctctgggagaatggatggggaggtccagtgaagccctcaagaggccagagggaccctggtcctgagagcagtgaacccccatatttatcattcccttctctgtgcctcgctccaaggggacccagaacctacccccaaggagctcacaaaattccacttaggaatgagagaagatgcatgcccctgaagagaacgcccacattttctccagctcagaggagtgagctccacggctgggatgtggaaggcttcctggaggaggtggaggtgtagatgggggctccagggtattcagaggtttggagaagaggcaggaagcacaggtggtgggcaaacaggcctgcctgggcggagggtagctaggatcccaggctgggtgtggaatagcaaaggccacagagcctgtgagcagaggcccactctggggaccaagtgcacgttccctaatgacccctgtttgcctggtcaccaagactcgtgtttatgtggaaaagctctggcaacagcatgggttcaaatactaccctccctgcttccaaaccacgtgttcctggacagtttagcccatgtgagcctcgtcttcaaccacaaagtggaattaatagcaatctaccccataacgtctccatgaggtttaaatgagattttagagagagagccgtctcactcagtgcttgggcatttttggagttggttagcctgggtctgaaactcggctctgcctcttactgaccatgtgcccttggggtcacctcttaagacctcagttctctcatctgtaaagtgggggtaagagcagtgagacgtcaataagtaaatacacgggaagtcctcagcacaaagctggcaatcctgagtgcattaactattattatgcaaggtgttcctgcagcacctagtgtgaaggaggtgcggtgaagtccgtattggaagcctcctgcctccatctccagcctgtggcctctataggatcgggaaggaggtagttttactgggagcagaagtggtctttactaggactttgtaagtcctttattctgtctcaagaaatatttgatgctcaccttaaggcaagtggaaatggtaaaacctcagccagtccatttccctcattggtgatgagccaggtgagcctgggggaagaggtgtggtacctggagctggggaagatgaggaaggtggggagaggctcctgtcaggcaggtaattggggatcaaggggcttcctgtgtcttcccacagaaggggacgggagacaaggcagcttccactgagtcgcctcattaacttcgccacaaatagcccaacagcctgtaactccctcaggcagaaatctggagctgttcagaagctaaataaataggagtgtgatcattaaaaactagaggtgctgggagcccccctgccctgggtggaaagcccgtttcctgttggaaacaccagtctccctaccatttggagccacaggaaggggttgctcgaagacctcaggggtaaactgttctggagggtgcaaagggtcctgaaagtcaggcaaaatccccacaacgcccaccctgcccagggcccacttctccagagtggctcttttcttcccaaagtttccagtgaccccaagttttgttgctcacactcactcctgttctcaatcctgtcactcagaatgtcttgtggtttctgattagcgataggccctgctggacgtctgaggcctcgactccatgcttacatttgcatttatttttttttagtctcactctgtcacccaggctggagctcagagtcgtgatctcagctcattgccacctccacctcctgggttcagcttcccaagtagttgggattacaggcatgagccaccaggcccggctactttttgtatttttagtagagatggggtttcaccatcttggccaggctggtcttgaactcctgacctcaggtgatctgtctgcctcaggcctcccaaagtgctgggattacacacctgggcagcattttcactctcttatacatatcctcagaagcttaattattattactattttaaagacagggtcttgttctgttatccaggcttgagtgcaatggcgcaatcatagctcactgcagcctcgacctcctgggctcaaatgatctcccgccccagcctccctagtagctaggactacaggtgtgcaccatcatgcctggctaatccctagaggctttagacgagggagttaaggcttctgcctgctcagacttagaaatggaggcctggtaacaccctgttcatttccctgcccttgagctgtcctgggatggtggaagagagggtgggttcagatttgagtggcgtgtctcccagccaccctaagccaacctctgcccccacagtgccagtgacccagggaagactgacttatcatctccctcaatgtgccagaaaacctctcagctagtagataccttagtgtccagggcttacttgcgttgggatggcattgggggtagtggggcaggttttagcagcggccttgggaaggggaaacattttctataaaggaacattaacagaggtgacgccccacccccaggagaacctcgttatgaagagggggtgcctgaggtggcaggaggccccaggcacagggagggaatgggcctgagggtggccatcgagttcgggtgggtgggatgagggtcgcccgtcctgactgagcagttaggggctcctcatgcatgtcactggctgatcacttaacctcttgggccctgtttccccatcactaatagttccagcctcatgggaggctgtgcatgttagtcaaaaggtccatgccaggccctgcccagcgctgaggttagcttctggtgcttagctgcagtggcccagtctggagagcccactccacccccagtcctctgttcagcagtgcaagagcagggcatccacgggggcgggcagtgggcacacacccctgctggatgggtgggagccccagagattataagcagagcatatggtggctggtgccagagggcccctgggtgaccctgaagcccagattcctccggtcatcttcacagggttccctcctgtgatctgcatgtgagcacacacacatctggatttggcagaccctgtatatatactaaacccctgggcctgccctcgggaggctgcccattctgtgaggggactggccttgggctcatggagaaataaacaggtgcccagtgtggggtgcctggaggcaggaaaggctgggctggggctccaggcgggtgagggaaggtggcatgttagctgctgttcctgctgagccttccttccctccccacctaccccacccaccctcacggtctctccattctccacctcagaagccctgctgcaggagggagtcccggagattatgagccgcgcttctcgtgtgccaacctgtgccccctccccccatgggcatgctcactcttctgccatgcggcctgctgcatttttttggatgacttgggcagctgttggtgtccggcccaaatctgcatcctctggcttctgcccactggcccaggccagccactcaccaccaaggatacttcaattcctcttctcatgtaacctcttgagcgtgataccccttctcccagtaggggggaccccagtaaccccaggaaggaaggcaggctctcagggtggactagccatagtggtgatgcccgtggcctgcctctgataggcacaggccgtgggcacagggccagcagggtggacacgggtgatgaggcctggaaggtccaaaccccatccctcgccctgtcttcagactccagcctcccaaggggccctcacgatcgcttcctgttagggtcacggctgagcagaggctaccagcaatgatttcctcccggcccagcagctgcccgccgcctgctcctcctcccccactgtcgctccactactcggtctcatttctaaaagacctgaggggaggatgggggcaggaacagcagaggcgtagctgatatttctggctgtccatctgtctagcttgagaatgcctgtggctgagaaaccaaaaggttcctttgacggcccttagaagaagatggggcaggccccttggtaccagtccccaagggccaagaagaagactttaataggaatccctgcctgaagggcaagttcaggatggcctgctgagcttcttgtaattagcagcctgcgaatccaagattctataattttgttgttgttgttgtttttggacttgatgtgtctgagagtccatcatcatggtagcctacatgtatgccaggaactggtcagatcactctacttgtattgaccctattcatcttcaaagcctccttaggcaagaactaggcccccattttacagaggagaaaactgaggcttagagaagtcaagcaaccagctgggtttcatgtcctagctccagacctcccagggctcctgtcttgagactcagttagctgtgattcactttagctagaggagaggttgcctaagcaggcctgagaagcttggtgggttgccagtgccgaaggcccccccagagagtctgtaactgagtagcttcagcaagagccccgcagaaacatcctacaggcacctggcttgtaaagacacatgaagacctcctcaaatgccccatatccccactgccgcgtagccctctccagtcagagaactagctcgtgtcctgggttagtgctgtctccagggctctagtctgctccaggagtgagccagaggccctggtgaacacatgtattatctgagcagggggaggctgcagagagaggggaaatgtgcttatcgggcacatctagctctgtccctgggaggctgagctgtacttgaacaataacagtagtaactggcaccacgacagaaggcccgtcttctccttggcctggcatctccccaggagatctctatctttaaatcacaggctgtcggaactggaaagagcctcccattaccattgcccaagtggaggcccagtgcttctaagtgccgcccaaggacgcaggatcatcatggtgcacctgggccattagagtgggtgaaggccaggctaacagtaataataaacttctaacaatagagataatagcagcctgttagttatcttgtgtatcacctcctatgtgattacagcctggagggaatgtggggctggcctagagtcaccacagaaggaggtgagacttgcctagcagtccctggctgccagtgagatgcccacacacgacctggtgctcagagaggctgcacagaggcccagcttgctggtcggctttgtggaggcctgaggcccttcttcctaggccaaccccagccccctggagtgcagtggggagaggacatgggggggcgtggcattccctcacagtctgtctcaggccctccctgtgactcccttcctgcgtggcgtccgtcggccgtggcccagaccctgtgtctgttactatgacatgtgacctcgccccacctccccctgggtgagatgatctcctttgtagggatgaggaagctgaggcccacagtgcccaaaacgacatggccagaaagtggtagtgctcattgtgaggtactttgaggtcccccgagctagttcagcagagaggaaagactgctgagggagaggagagcctggcgtgggcttctttccagcagctgagtgggcagcttcctcttcatctgggccctgcaccaatacagtcaggtctgcccccctctccctgggcagggcctgtccaccctctagagacatcaacacagcctgtggtcaccaagattccagggggatccactttgtagctggaatgtggtcaccctgcagttcaggcccttgtatagccattgtccgtgtgagaccctggctgtccctgcagagggttggcggtctgccatggcaggccaggagtgcccagtgccctctcctgccacatccgttcctgtagatgattgggtctgggctcttggtcggcggcccccagaatctcacacacacgtgttggaggtgtctttatgatgcctgggtgagggagacggggccacggtgtcactctctctgtcctgggcttggccctgccagcagcagggcactgggtgtgtcccagccttccagcaggtggggccatggaacacccaatgaggacctcagcccacccattcaagagtctggggagccgggcgcggtggctcaggcctgtaatcccagcactttgggaggctgaagcgggcggatcacctgaggtcaggagttcaaggccagcctggccaacaggctgtattttgtattttctattaaaaatacaaaaattagccgggcatggtggcacgcgcctataatcccagctacttgggaggctgaggcaggagaattgcttgaacccaggaggcggaggttgcagtgaactcagatctcatcacggcactccagcctgggcgacagagggagactcagtctcaaaagaaaaataaaagaaaaagagtctgggggctgctttagggccaagcagaaagagcctgggcttcagatcagtttccccatctgtgcagtgggggctgtcacaccttccctgcagcagcactgtgcagtgaaacttcttgcagggatggggacgtcttctgcctgcactgcccagtctggtagccactagccacacgtggctattgagcactggaaatatggccagggtgatgaaggaactgaacttttaattttaattaaagtttaaacagccacatatggctagtggccactgtgttggatggcacagctctgaaggcttctgggaagatgccatccatcaagtgcccaacaccaaggttctcagccagggttagttcccttccctgttccccggggggcttgggaagccttcgccaccccctcctcagaggccaccccacctggatggccaaggttggagagactagacagtccagggtgggctggaaggaacatggaggaaaatcagaaccacagctacagggatcacctaaggtcactgggtgaatactacttttaaaatctcttctgtgcctcgtgataataacattggttgagttctaaccaaataccaggcactgcgtgaaggaccttatgtatcaggctgcttaacccttggagctaaccattgttctccatagtttataattgagtacaccgaggcccagagagatgaagcaacttgcccgaggtcacacagctggtgtgtggtagtgccaggatctgcacctgggtgtgtctgtctgcagagactgtgccctttgtacaagcccaggtctctccatttatttagccatcacctattctgctgtatctagtactgggccaggcatctttagggacagagaattgtgcaacacaaggttcctgccctcttagtctccttggaggaactccctgcacaacacgcccacaacagaaatgatgcagggtgcccccaggcataatcagcatgagactctgagccctggccttcacagggtggtggcaggttcatccctacagcctgggccaatgcctgctgggtaagggtggccccccaccccagggccactcaggcattatgacgacaccctaaacttgggtgttaaggtttggttataatctcctaagatgacacctagcccctgggacgttgcctggcactgcagaaggtttacagtaaatatcagttgggtgaatggcctctagtgttccagtgagccaggcagaagagtcatatccttcttacagagggcacagatctggaggaacctggagacttgccctaagtttgcccctactcaggcccctgcttctttctgaggctagccggggagcaggtggaaggaaaacactcagcttgcatacgtagagaggcaagtcataaatatcacaacctccaagaggagaggagggaggagggaaggcggatcctgagagctaggatgtccgcttccgagaacccgcgatctgcagccgctgccagcaaggtcctgcaggtcctagggacaccctgtgtgcatgcatgcatgcctgtgtgcgccgaactggttggcggcgggggcgtgctggcgtgcttgtgtgactgtgggcgaccatggcacgcagaccgcctccagctcccgctggccctccccaacccacttctcagttctccagcagccagatgtctcccagatgttcctcacttcctgcctggctccgtgcagtgcatgtgtgtgtttattttggacaggccactaaataataaccattttaagaaaagcttttcaaaacctcgttcccacgaggaatcagagttcaggaaataatcccaattctattcactattgtccccgggctcccttctctgacctcctctcccccaaccctggggaccacttttgaaaagatttctttttatcctacatgacgtgtgctctctccataacaccatctctctgggagctagggcttagagctgggagccccttagagctttgctaccagcatcacctggaagcttgttaggaattcgaggcctcagcactgtcccagaccacaatcagtctgcgttttgacaagatcccaaggtattcgcacctacattcgcgtttaccgtgagcctagctctgtcttattgatggggtaatggaggctgagtctggcaggggggacccttctatcaggtcttctttagcagaatcccagtagggcctggtggtacagactgagaggccctgagccctcagagcttggggtctgaactgtccttctgggtgggctggcggggagaggcagcccagctagtctctgatgtggggaggcaaaggggtggattcatccagagaatatgccacctcatccctggtagccagcatggccacagactaggtcccatgccagcctcgccgtgccacatggccactaggtttgggccagtcctagatctgctctgtgggctcctgtgagtccctgctccacccacagctgccctctggagatgggtctggccctccctgtctattctgtaggcactctgggtgctcaggtggggtgccacaagctggtgtcctcccgttccattgtgacccggcttgtcatcctgcctcctgtgaaaatagagcaaatcgtatcagctctgttggtctcagggcagtcccaaggacacggggctgtgacttactggtgatacaccgccagcaccctcctcatttctgggcgtcatggctccctcctctctgtatctgagcgagggtgtgcggaaggcctggcacacctggctggaggtggaggtgggggcggccccgagagaactgaagctcaggctgtcctcaggcagctggtggcttagctgggaaacaagactcccgcctgtggaagcctaaggagaaaccagcccccagttcagaagcccagcagttggtgaaggctgccctcggtaagggagacctggtaggagttcattcgtcaacaagactggcgtggcttggggggctgcatactgtacgctgggagaggtatgacgctgaggaggcatggaggtcccagaaaggcggaggaccccaaggggagaggatccgagaggttccttccagaaggatggctttgtggctctccacacccaggggcaggtgagatcacagtggggtggggggccaggatggtaggggagcccacctgagggaggtggggctgaatcagggaagcaccctgtgggctctctgagctccctctctgcacagggaccaagctgtgggtcagagtcctacatattcaatatctattcaccaacaatcagtgggtacaggattggtgagtgactgggttgagggaaggaagaagggagggaagtgagggagggagggacaaactgacagttggatgggtggctggataagtagatggaaggaaaggaggaaggatgaacaatgaatataatcaccccagcgctccacatctgtcaaaaccctttcagagccagccacattcttttgatcccacacccatcctttgaaggagataaagctgagactatattcgtagtgtcaataagactaagacccaggccagagaggggagcagagggcggctgaccagccggcaggctccctctggggcgaccacttctttaaacactccgggttcacggtgctccctgaagcagggagggcttggcactgagtcattcacactcccttgcccactccctgtgtgaccagagccccaccctgaagccgtccaggacctgtctgatcacgcccctgctacctggagaatgtcagcgccaggagctttcagcctccagcctttgcccagattccagtgcaaaccaaatgaggaagtgcatgacccaggttgttcactggggccgtgtgcaggcccagcagcattgtccaggaagctcactactgagcaataatagaccaccagcttattcacagaggttccttgagacaataggatagtaaaggcctatccctgccctgaaggtgcctatggagtcagaacagagaggtcactcagaggtgacagcatcttgggctgcagagtgaacatccagaacatcagggaaggctccctggagcaggtgccattggcactgggtgtacagagagggccatggctgtagggaaggcactgttccatctacccagccttgcagcagtcccctccacccctgcccctacctggctaacatgcggagaggagaggtgattcagcaggcctggcttgtttctttcttgcccactgaggcctcgctgttggacaggctcccagacgttgcagtcagctggaggcctcaccttctgagctcccagacctgaccctctgcactttaacctggcaccctggccccagctgagttggactgtttcaggagtctgagtctgggccttcctcagctgtacacccccagtccccaggccccagcatggatgtgagcgagccacagcacccacactgggacctttgcatggttgggagttctgtgccatagaacaaagagaaaccaggcagtgagttctatagaaatcagaccgggggctaagggaagacatgcttccttttttgctttgccctgggatgtaggacccaagtgaagtaaggctccctagtgatttgggggtcttacttgtgtccttgagacctggaaaaccctctcaaggcctcagggaaaaggagaaaggatgggaatgccgcatctgcctttggcaagctgctgattcacctcctcctatgtggcctttactttcctactctgtataatgggtaggagtggactcaattgcccccttctctctcccctttgccaaagcctctgacttctagcactgcctttccaggcttgtggtatctcagggaaggagatactggtttcaccctgggaaccatccaagcacccaggtccctggtaccagctctcagctctttgatagcagtcttggggcctccctgggtcctgtctctgaggagcagaagaggagttgagctccccccacttgcttccacctctcaggtaggcagccttgcctctggccttggcagcactttcccaagcagggacgccctgggagcctatacggccaggagggaggcaatacacacagcgccctggagaaaagccccccgcacctccagagcagaatgagctagcgggaggcagggagaaggggggcccactttccccttcttcccctgagttggcacttttctctttgagtgttaaactcagctcttcctttttctcctattcctgacagcctgttgaataatttaaatatttgggcctaaagggcttcaattatcctttaatttacattagtaatttatgtattaggcagaatggacacacggttagtgtaacaacccccagtagaccggctaatatctgctgcactcaccgttcttaagaatctcatcatttttctttgcagcccaaggtctttgttttcaaagtggctcctaggcatgcacttttacacagacctgtgtacatgctcaggggtacacagcagaggatgcctgaactcatagagaacattgacatgcacccacttacaggcaggcacactgaagcagtgggtacaggctcctccctctctctgtctctctctctctctctctcacacacacacacacacacacacacacacactcatagatgtaaaacacacaccatgtcagaccagccatctccactcccacctgcaccccactccttcctgtgggcagtatgtacacatatgcttgtatttgcatctgttggccaggtgatcccaaacatagctccctctggcaaagaggctactgggccccagcatgacattcagatgtcccattctgtgtccaagctttcagtccctttttgcacagccctacacaggcacctcaccccagggttgaacgcactcatgagaacgtgaccacggccacagctccagtgtgctcacatgctgtgggctggcaccagctacaaagtcctcctgggcttctcaggcatgctcccctccagagcctgcagcctgggcaccagtaacctggcatggcctaagctattgccctgacatagctaggctgccaaagggaccccatttgggattgccaattcctggctgcccctcaaaacttggcccagctgccccagcaccagcttgcaaggattgagggctccccagggggtggggacaaaagtgacagagagtgataaccctatgtgtgagtgtatattccaagcttgttaagctgggttgggcccctggttctgtggaacgcaccttgcacctctgtgccgagaccatgctatacaggtgaggcccttgggatccagagccatctctgagaatgtggctttccagctgtcatttctaactccaggagagtcccctggcatggtccctggctcctcctaccaccctcatctctctcccacagccacaaagcacagagcaggtagaaggcaggtaatgcagtgggcagtgcagatatctgattggtggggtagtccattatacagaaggaaaaaccaaggctgcaggaggttagggcatggaacagataggttacttagagaatcttctggaaaggtccctcttaggggcactggccacgtatcccagtgccatgagggcttttggagcccagatttccctcttcccactccagtgctcaggctgtggttctggttgggatggggtggggacgtggttcctctccccaagcatatgtttaggctcaggagaacagcccagaggagctaagtggaaagtgtgtggccacaggtgcccatctctgtgcctcttcaggagactgccatgacaccaggcatctcaccactcttgagcagggcagaggtgctgggagcccatggcaaaccccgctgggcctgagccacctgcctgctgaaggcctcttaccaggtggtgccccaggccctgctccccaggatgccttgaatgaaggggcagtgccggtgggggagacatcagaactcctttccccccggccctagggatgaccccgagcctccggccgttctgctgggtccaaatgggatacttcctaccgggttgcatgagctaggccccttctggaagtccccatcattgcccctctcccagccttggcctctcttcttcatctgtctggcctggcttgggtgtgtggatgcttcctcaagtcccagcttaattcctgactttccgaggaatcttttcctgatagctccaacctccccagacctgtatagcctgtacctcaaaatctagggcagcagtggcaaacggtttatctcaggtggctgttttgaaagtttgagggtgacttcccagggtgtagtgttgagaaatctagggccacatctggactcatttacagaagtcagcattaattagtgatgtctgctgtggtgtgggatggggaggtggtggctctcaggctgggcacatgccaaaacagatccagggctaaattctaaagtattgttgctgcgctgcagtggtttcctgaagggttatccccctcctagctcccagcactttggggtagagattataacttttctaatttataatctatgggagtatacttctgtctcctacagattctaatatagatctagatacatagtagacactgaagaggggaatacttacagcatgctagaggtggaaggaattctagagatcactgagttcagggatggcaagtaggtctcctcttgctaccaatcctgaacaaacagtgatgactttcaggagatgtgctgattcagagactcagatctggctcagttgggtcaattagtgatgtctgtcatgggctcagccatggtagtagttgtaccaaggtattgctatccctgttttatttcagtcttccaaatatattgatatggaaactaggactcagagtgggtaatctgtcagaggttaccccgctgcttgcttggatggttagagaatcctcactccttccaaaggagtttccctgtcagaggtcagggtaaggaaggtagaatcttcaaagcctggatagacaaactgatgatgtgtctttctgagactggttcctacagctgtagtctttgtatgtcttcatgcggtttttaaacttttaaactttcaccttttgatatagtaggtggtaggtacaatagaaacgctgtacatggcatttaaaggcaaattggattttcttctggcagccaccctggacttcagacttgcaggccccagagcacagtttatctccccatctgcaagagcgattttccatttgctccacaatgggaaataagaatccatcatgtgccattgtgtcaggaaggtggtgtctactttaataaatttgcttttaaatgctggctgtctctggagatcgtttcgctcatgcctgcagacaaagtgattaaagttgcagagtatacatggttcctgcaaagacccagaaggggtcttctcggtccatatctgaaacccttgccacataggggaatgaatgaaccaagataattcctctcctgtgagagtctcagtgccacaggctgaagcacacacagggaagaattgaggatatttatttttctttaagttgttttcccccaggaaaaaaacccacaggctggagatgtatacctcaagtcattgattttatttcctctcaaattgaccttgcttttctaggactttgcctctttaagtgtaccaggtgtgacatctttgtaagtaaatgaagtgctgtgtaatgttccccttcacctcctccaacaaaaaagtgatttgaaatctgggttaaaaataagtgtcacatatatatattacaatattttcccaaatgcctgtgctttaaaaatgggtgaagggacagttaacatgctcttcagtggtatctgaatcttgaattttatttttccaggtctagtccctatatagttgatcattcacagtgactctaggctgatctcttgccctctctgggcctgttttgccatctatcaaatgggctaactttgggcctgagcagcaggaagcgtgatagagcaccaggctgtgagggtggctcccttttgtgtctctgcattgagcaggatagagtttgacctgctgcctaccaagtgtcctgccatgagtcccagagccctgcagttaatagcagccacgccctccacctcactgcctgcttctgtgagagcgctttcaaatctctcattcctctcatctcacaattaccctgtgaaggcgggactggtattgcattgtacaaaagaggaaagaaacctgggcttggagagattgctaataatgacaaccactagcagtttttcagcttttattatgtgccaggcactgcgcgagcttgttgaatgcattgcctcatttattcttcagagcaaccctaaccctatgaggtaggcatcatttctcccatcttattgtgaaggaaacagactcagagaggtgaagtgatttgcccaaggccagaccccttcacagagacctgccttgtgagacggcacctgcaaggagagggaaggcattggtagcagtgaagtccattccagagagcgggcagggagtgacagcaggagccccagagacccccaggacctgactcagcctggcagtctgttcgggtctccccaggagagtagacggtggatggggaggtgaggcttgagggttaggacagagaagagggggttttcttagagagctcaagggacaggaggagagaagagagacagagcacaagccccaggacctgtgtccaggacattggtcatttctcaggaccccaggcatttccctccatccctcttagctctttgcttccttgcagctcagacctctaaaatcctcccctcatttccacacttcacctcctcacctgtggactctgggtctgcaccctctgcttctcacacttccttgctgcagactccaacctcgggggaaccccaaaggcccaaccctccccagcactgagtatcagaagtgccacagccctgccattaaagggggccaccacctcctttccccgtagcttggtcttagtgatgctggccaccctactgcaaggcccaggcccaggagtagacagtacccgagtttgggtgtccttcccttcccccgacaccatgcccaaggaggagcagcagcagtgcagcttcctgggaatgaggctttctttccaccttctcctcgtccattgccctggaaatacctgtagcaggtgggcaggctggcagggaaggccaggcgcatctgatgtcactgctccccagcattgttttggttctgaccacagtgggggtggggtgtatgtctgtgtgctaagtccactcagtcccagggcaagctggggctttgtctccctctcccctgccaagctccctggttcctggctgaaagcatttccagggtgtcagaagctgttggcatcgccagggctgccaaggggaggaggggcaggagagttgggtgggggtgtgagggtcctcctccccagagatccccatagcctgggagtgagaggtggacactgtacccctggtcagtaggggagcaggggtccgcaggacactaggaaagctggttcacgcatgtctcccaggaggtgttcagggagcatttgttaagatggggatcgctgcaaggtggagggtcccagggacccccttctggttccaggcgtgtccttcctgctcactatatcatgtcaactccatcaacctttagccaggtccacgctcgccaaccagcagtccagtttcccaactcagcacagggggaaacggatgcctagtagagaggacaaaaatgagctcaacgtcacatcaagtcagcagtattgttgggactggactccgaagtctgactcttggttcaatgctctttcccctatagcaggtggttatgcaaagtaatgtaaattatatgcaaatgtctgtggcttcctacctacgcctagcagagggggttttgtgccctactggggctggcgggagtcttctcccgtcacaagactatcagttctgaaagggctcgtggtaattgttttacccactatctgactcagggcctgggccccaaccttctgtggtgatcaggaggagcacaaatggctctgggaccatgggtacctggcgtcctgctgtcgtggggggcatagggctgacaatgccaggaaatggccagaggaagcctctggataggcccctagagtccacacgacagtgtgggcctggcttggggaggttttctcacgagtcctgggaagtcggcttactgtctccaggccccctgggtccccatcaataagctggcctgaatggagaggctgggttggggggagggagatttatttcctggctttaaaaccagccattctcccgcctcccaccttcctcctggctggagaacaatgggacatccccagagaggccttcctgtggcaacaggtgcactgagcagggtggatgaccaccacccaggcccccataggttccagctgtgcacgtggtgagcctccaccattggtcctgcttccagaacagcagcctggcgcccttagaaacaacaccaggcactgaccctttctccactatttctgggtccaggaagtggcttgtttgtttgtttctacagtccagataatgttgccatatttccccaaatggtgggaactaagttctgaaaaataatcacccttaatcccacccagacacaactactacttgcatattcgtgtgtttcctttcaggctcatgcccaggtttgttttatgatgtcatcacatacttacaggtttcatttcatgctcaggcctctacacttaacattattccatgaatctttctcgtataattacatagacttcataattagccattaatacccgagaagaacccacagtggggatatactttaatttactcaagcagttctccctttgttgggtatcttactctggtaaataacactgcgttgaacatctccatgctcacagcttggttgggttccttgggagagattcccaaaagtagaattctaggtaaaaagacacgccctcattcatacacgctgctagattgctttgtggatttgatgcaagtgtcgtcaccaagttgtcattctccgaagtcccagcagttgttcatgggcccacagggtggtaagaagtatttcctagacagcccagacttccaaatgtcaccggctgtcactgattatggggggagggaatgtgaattgacacaaaaggagcttggggctctcacttccagggtccctaacttagaaacacccccgggctttagggacaggctttactaagaggccactccttgttcgtaattagcgccatccatccccagtcagatctggaatgagcggaagccctttaaagtaatttgctcttttaatatcacccctgtgatctcatttaattttctcaaccaaacttcattcacagaggaagccaaaagcactccaccagcccggactgaattctcaccctttccaaacagtggctctggacttctgcaagctctgctgagatttgtctggcctccagcagcttgcatccgaagccaaagggctgtctctgtccaacaacaaaaggcaagagcatagtgtaaaagctgtggctttaaacataggcaagcagctgccactgcctgctctgagcccccacggtggggaggaaatcgactatgtattgagtcatacgccctggcaggctccgtgctggacatttgttcggttgggcgggggcatgttctcagtgatccttctgtgaaccctgtgagattggtatgagcacccattttacagataaggaaacttatctgtaagctctgagttgcaatgacttgtcaaggtccctaccatagccccttctttggaagatctccaggtgacattgcacatggagctgtggcactgctgtcacaatgtcataccccagaggtgaacaggtgagtggacgagtacccgccacacccctatgctgctgccactcacacagccactcccagccctggccccagctcctccaggaagggagcctccctccgctgagccagcagagctctcaggccattggcagctgggctcaggagagccatggtgatttatggctgccgcgtctccccagtgccctgcctgggcccagtgtacttatggactaatggaagctcgaatggagggagataattctgccaggagctggctccagtgacaggggcaaccaccattgcctcagggcaaggataggttcgggaacagaggggacttgggcagaggccagaggcagaggcgctgaaggctctgagagcagatggagcccaggtggggactcgggcgtgcagagggtggcacttcctggcagcccagtccccagactggcttctccagggcccccagaagggagccaagaggtgggccaggagcccaaggccccagaggcctagcagcacacctgcccgtgcatttggtgtgtgggttttgatattcttagaacatccaagcttctcacctaaccccctcaatgatagatggggaagcaggggcccagaaagggtcagggacttgtccagggtcacacagcatgttagttactgagctgagacaagaaccctgggatgtcacaagaacacggcagccggtgtggagtggagaggaagaccttgggcagggtgggcaggagggtgagcacagagcagggaaggtgcaggaagacgacagtcatggtcagggattaaagaggatgctaaggaggaggctgggacagccccaacagcggggcccagaggaaggggtgcagcagctggcatcgaccctcctggtaagggagggttaagggggacctggaaacccacagccccactgggttccctctgtgagccagcaggtgcttcctggggctctgctgggccctgaggggtgagcacccccggatcccacctagctcctttccactgatgtcctccagccagcatggcccaccactcagctctcctgagcctctctctgtgtcttcttaaatgggaccgttatgcctacctcaaagggtaagtgggaggtaagtgaatagggaagttcaggttgagagaaagccgaagggaagaagagacgcccacctcagttcagatgtctcaggacccctggcacctctcttgcccccttccccctccaggcccacccaggcgagtcacataggttgctagtgcctcagtgtatcccatctgtgaaatgggctcccctcccagcccctggcaagaaggcatatccctgactgggtggtgagcttcctcctgcatgccaagcccacacagcatcttcgaggagcgcctcggtggtgagctgcaccagcctggactgaattctcaccgtggagagatgtacatgccaggtgctccttggaggtgctgtgtgggtttggaagatgttttccatggcttggggcccagcagccctctggggcctgacaaggagtgaggaaacaaccgcgcctgttgtagggcaaagaggaacctctgtcccctccctggaatcactgcaggctgtggccaggtgtgcagggaactctttcaggtcatctggctcagtggcttccacaaacacctagaatccgtgctgtgcataggcacctgcctgtgctaaagccgtttgatatatgtgagctcctggaggtaggcaatgttctgataccctctttagaggtggggaaacagaggccagaggcttgaagtgccatgcccaagaaacacgtgctttcactgggaactgtttttgagagttcacctgatgccaggtgcacaggagctaaggcattacttatcctctaggctagggactgttagcccattttacaggcggagaaaccaaggccagggagacaaaatcacctgcctgaaggccccacagctatcgatgccgagactctatcctgcggatgttgggctctttccactgagtaaggttccctcactctctagtgccacatggggtgccctcagtctgggccagggcagggcagatgcagggccccccactcccctcctaggatacaggaatctgtattgcctcaggcttgtctctgcccacctgctggccaagtccaggacagaaagagagggctcacaaattgggagactctgggctgaagacctggtggtctcagccatttttgtttcttgagggtcccaagaccacccattcctcctccaagcccagccctgtagctcctccaggaagcctggccccttcctgagctgtgtggccagctctctatgcttcttctggaacctccactccagagcacctgagagcagcaggacaagccgtggtcttgggcagcgtcctttcagaggaggaaggtccagagaggggaagggacttgtccaaggtcacacagctagcgacatcccaagcagccctgctggagctcttcagagaaaggacaggaggagccaagggtgagcttggccaagctggcacccacttgcctccagagtcaccaaggtccccaccctgccccaacattgccttttcccgaggagttgattcccaacccagcagaggagctgccagatgggtaaagaccctcctgctgaagaactgagcatcccaatcccctcttgtcctccccgcccagtggccagccaggtactgccctgtccaggaggcagctgacaggcaacagggaagagctgagcctcagggcaggcagcccgtgtgaggccacgtgagcccaatgtcaccagggtcccatcgggtgaactgggatagaatggcccagcctttcctcatgggcagggtggagggaggtgaagtatggccattcattagaaaagtaatgactgggccgggtgcagtggctcacacctataatcccagcactttgggaggccaatgcaataggattgcctgaggtcaggagttcaagaccagcctggccaacatggcaaaacccttctctactgaaaatacaaaaactagccaggtgtggtggtgtgtgcctgtaattccagctactcaggaggctgaggcaggagaatcatttgaacccgggaggcagaggttgtagtgagccgatatgccactgccctatagcctgggtgatatagcgagactccatctcaaaaaaaaaaaaaaaaggaaaagagaaaaataataatgactaatcttggacttgggcagcccttcatagtttatgaagcacttctgcatctataagagaatgtgttctgttcacccattcaaagactaagaaaccgaggctcagagaggcaaagtggctagcccagtcacacagccagttagactgtggggaggacttcagcctacacaaggtcagcgtgagtttactgaacgctgcagtcaggccctgtgcttgatacattcacatacatgactctgtttaccataacgacagccctgggagattcctgtggattgtcccattttatagaggaggaaatatagacccgtgacttgcccaggccccacagggagggagtgtggagttcggtagctcagccatagccaggctcagccaggtcagtgggcgtgggtccctgcccaacttgctgagggtctcaagggtgtattctgcccacctcctgagtttggggtagatagcccaggggactggataggggcagctcggagtctgcccatcgtggctgtgggaacactgcctgctggggacagtgcctggaacagcacagtttgggtttaagctggagcctctaggggacaaacaagccaactgccaggcaggagcttcatcatggtagctcctggtggagagaggtagggggggcatgaagcatcaggagcagaggcactgatgccctctccttcctgtggcccagcatgggggtggccaccgctctggccactgcccaagggggtggcttctctgcttttgccagctgtctccagcctgagatccaaaactcagcttgagaaaccacacctgagaaatccggcattccattccttgccaggggcctcaggataggggaggcaagcaggggtgctcggggaccgcctttccccacaaccctagggaggaggtggagtgggtggaggcgagagaggcgggctgggcccgggagcacggaggcctctaatggcaccgggtgtggcccatagtcccgctggctagctgccttgtttcctaattaaagtgcccttatgaaaatgccctccggtccaggcccagtgctgctgggtgaggcaggcacctcccaaaaaatctcagcagctttcctgtcttccctgcagggcctctgggctcagggcccttggtcatctgggggaggctggggggcatcagggctatgttcaccctgttatcgtcactgtgctcccagaagctgttctctgccatcccattgctgaaggcagcaggccgtcctcattaaagagcctcggcagccaggatcaaaggcactattgaagaggctcctaagagctgggggacgccagggccagaagacgggaggaggaggtagcaaggagactgagtcactgcaggccaattgtgatgagtgggcagtgggtggctggagccaggttttcaggctgggaggaaagcccagccaagaggcccaggaaggggcgggcaggcagctgggagccctgcggagaggttgctgctgttgcgctgggacacctccgctgctgagcaagactgctcccccgcagcccttacgaaagccaccttctggtgagggcagcagagcagccggctggttcactattaggggccagcgtgggaatggggagaggatgggaccttgagtcccaatctttccatttgggaagcccataattgacagggctgcaccgagggtggcaagctggcagtacctagaggctgtcattatggaataagggcccctcagttctttaggcaagtcaccccaactctctggaccctgtttttcccttgggttgagtgagggtgaatagggattaatgagatggggagggggtggaatatcttcatcacttgattggttgtggctgagtatagtcctgtgctgagaaggaggccttgtccagatgtgccacaatttattagtgatgcttgccacagcctcaggattggccaggtggccgtgcatttgcccctagactagattgactctatagcccttgcacactctaatatcctgagattctgaggctgacaaagcccaggctggcatgcaaaagacctcccaaatgctggccctgacttccccaaaggacatccttccctgagacgtcagtggaaatctgagcctcaatttcttcatctttcaaagggagagaaggactcagctggacctctcacctgcctcaacctgcaaaacacatcattcttagtattaaccgagtccttccttgtgcccctccttgtgcccagtgcagtgaggagtgcaagatggagtgtacctacactctagagtcttgccctgtgcaggcctggctggagccctgcatctgcctcttactggctgtgtgactgggggcaagttattttaagcactgaaccttggttagtaaaataggggtaatggtacctgtccacagggttgctgtgcccattgaatacaactacataaagcctgtgaccccaggcctggcacagaacacccagcccttagatgggggctctgacgggaagggttacaagagaggcctcagttgacttctttgcctattctgaccttggctttggatgggaatttggacgggggtgggatggggtaggggggaggtgggaagatagtttcaaagcaacacaggcccagactgttcgctctcaactctcccgagaccgcagccccagcctgagctggcttctccataaactcctggtcccttcctttaaccagccccataaaaagggagtggggcaggagggagtctggctgcagactttgtaatttggcttggaggtggctcctgttcgttctaaccaggctgtaattacggctggcacccgacaccccctcattaccggagcctggaaggaggactctaattatagcatactgggtccgggctggagtgggttgggggagggagaccacagtggaggcctgtgtaggcagagagagactctgagctggctggggggatggggcagggccaggattgtgggggggctgtcctgggctcctcatttgtcttgctttcagagtcatcgttgggagggatggggcatagatcgaatccaggccacttccttggggagaacaggacccagaggagcccgcccgggagactcattcattcatgcacgaaggatttattaagcatctactgtgtgccaggctggcactgggttacagcagtgggtaaacaggtgccatccagccagaaatgatgttcaaggagaaagcacattaaagccatcttgctgctggaaatatctgaagaagtccacattgatggcaaatggccaccatcatgagccttgattaccctctagtcaccccagtcactcccctgaaccccctgggcctcacttggcacagcagggccccaggaccctcccccagaaccctgtcagactgttggctgcccacgcaggttaaatgtgtggctgtcactgagcctctgccctgggaccacacagtcgatgggggcacagacattaaaggaaatacacaaataagtatataacttgaaaaggtaatgagggtaataaggaaaagagatgccagacgaagagccagggccctggtttaggtgggagtggtgcagtcagggctctctggggaagtgaactttaaggtgatacctggagaaggaacagggtttagccaggtaggggtgggaaggcagcattccaggtgtctccatggaggcttgcagcctgggcatcctacgttctgaggtgtccccacaccggggtggaggcagtggggtttctcctgcatgtcatacaaagagcactggactaagtctgtagacttggtgctcaggcccagctctgccaggaactgtgtggcctcaggctagtcacaccctctgtgggcctcagtttcctcatctgtccaaagggaggccccttcaggccacaagccctccctccccaagcctgaggttttgaggagtccagcaagttctgttcaaatgccacttttcgggatgcccctgatgactgaaaggcagccagggcacgggggagggggccagagagctcgagctgagagctccagacatcccatccccttctctgagttattaagagccacccggaagcagacacaaagagaattgtcctgagctagatagagccagcccccagcccccagccgagaacaatcagagaggaaaaccaaggccatttgtccaacacggagtgcggcagtgacagcggctgggaaaatgccgagtatttctcagctaaaattagccacctactaaacctttacatcaagggcaacctgaagcctctattgttttgaacttggaatcccagaggacttgggggcagggcttctcaggagaagcaaatgaccatcccctctcccaggggctgggctagccaacaccaagccagtccttgagccacaggggtgcccagtaaggtaccaggggacaaacagacagacagggagggagtctagctgcccaaagtcaccaagcattggtggctgacacagcttctggttgccccatttgagacattcttccttcaccagtgatattgatgtactctgagctaaatgggtggcagggaatggggaatgttgaactagaagaaattgctggaaatataagaaaataactctttatcctttccagaggaagcagtcagaatgggcatccctatttgctaatggtggatagttcctgccattggggtggcaaacctggcttagaatctttcctctgccacttagtaactgtctgactttgtacaactttagataaacaatagagatggctattgataccaacctcataagattgctgcaacaattaaatgaaataatgtagaagatataggtattagcaatggtaataataaaaacaagaatgccgcttttgttcattaagtctttttaacatgcccagcactcctctaagctcattgcgtgtattaacatgtctaatccatgctagaaatactattaccccattctgcagagaaggaaatggaggcccagagaggcgaatttgcaggaacacaggtgatggccatcatttattgttattgccacacagcaggtcctgattccggctcagatagcgaaagcctggcaccatgctgctgtgtaattccttcagctccttttgaaaagtctccagctgaatcatagaagtgttaaggaaaaggaagctgacatatgttaagcaccattatgtgcactaagcgtttgatatttctgtcgggaggcaagagagcatagagccgtgtgtggactggcggcagcacctagacatttcttagaaatgtacattctcaaggcccaccccacaccgactgaatcagaacttgggggcaggagcctgggttttagcgagcactccaggtggtcctggtgcaggccatggtttgagtaccactggcaccaaggttaaagaggatggacttggccgggcgccatggctcgtacctgtaatcccagcactttgggaagccgaaataggaggattgctggagcccaggagtttgggaccagcctgggcaacatagtgagacccctgtctctataaaaaaaaaaaaaaaaaaaagagtatgggcttaaagtcaaagagacccagattcaaatgctgacaaccctgctctgtgacattagacaagtaacttaatctccctgtgcctgcaaactggggctaatgataagaatacctaccagaaagagttgcggggagggttcagttagataattattccaagtacttggcgcagaacctgagagctagttagcactgtaaatggtagctgttaactcattacctgaattacctgctagcactgaagaggtactaaagggaaaggtggttctttgtggccagggaagccgtttaatcccagctggggtgaagcttcccctctagggcaacctggcgggactgggggcccgggtaacagaggtaacccttgcaggctgagggcatcaggggtgtctgggatggacatttcctccccacctggcctgccctgtctagcaggggctccctgtcttccctgagcttatgatgccaaccaaagagacgcgtgaactaagaacttttctccgccgctttctcagggaaaccagctctgagaatgacggtctggtgatgtggcgatccccagaccctgggctcatgggggcttcagctgcatgctgtggcctggcagcttccaggaacatgtctttgctctcttcccctccacccgtgtgttttcaatggtgattggaggcctcaggggagccgtgcgctcctcttcctccctaaggagaggctctgggccagccgggcagcgagcacagtggacgggctccaccttccctgtgcttccactgcttggtaagggcctgcccagcctctgggaaccccaggctcttggtgaggcaccaccccacccccactgctggctgtccccaggtcccccatgctggccacatgccttagtgtgatgccacactttctttcacacctctggcctctagctatctctgtgaggtgggaacggtgaaggtgcacctattctacagagaaacaaaccgaggtcccaggagctaagactagggcccagagtcacccactgaactggtggcccaaaagtgttctggtatttcctgtcactaggccgtgcttctatcctttcttttttcacccctacctcatacttccttatccctcctcaagaaatccctagaagggaactgacaaacttagtgcctgacatgtaccaggctcatttcatgagatcctgcagctgtgaggggaaccaggctcagaggcagggggtggttcccccagcaaatgggggcaggatgggattgaagcaggtcccacgcactccagagcgccttctccttggctaacctcctgcaggttttgggctttttgctccccttcaccctccccgcttcctggtgcccctcctggaggagccctctcacggtgtcctcagctggatgcctgccctctggcccttgcacccttcctctgctgctcactcagaggacatggggagcgggccgagccctgagccaaggcggcccagcgattacatcagcaggtgcaaacaagcaggcgggagcagggacgggcgtccctcggggctggagacggcactccatccgccccacacgagtctgtttcattccctccttctagcttgcatcagccttttgcagctctgtgtcatcacagagtgggccaaggcagcagctgggaggctggggcaggggtggaggtgaggtgtggggctcgccgggaccctggcagcctggaaggtccactcactgttttttcctgagaatggagtacaatattccccccttactcgaggtctccctgtccacagtttcagttacccatggccaactgtgacaccaaaatattaaacagaacattccagaaatcagcagttcacacattttaaattgtgtgtgattctgagtagcatgatggaatctcccactgtctcactccatcctgcccaggatgtgaaccatccctttgtccagggtgtccacactgtatacaccatccgtcacttagtcactcagtggctgtctccattatcagatcgaaaaaaaaatcatctgtctagagcttggtactattcaagttttcaggcatccacggggggtcttggaacgtatcccccacagatacggggactcctgtaatagaaattagctagtgcatagggctgcccagctggcaaaatatttttgtacttctgactttggtgtttccaacagccctgtcagtcaaagcaagtaaaagtggtcccatttctcagaaaggaaaattgaggcccagagggaagtggctgcccaggggttgtcttgtgagtcactgacagcaccaacgcatttcacctcaagaagcgcatgggattataagagcctggagattgaaaaatccctatagtcatcaagttggaagtagttaaagcctgcttcctagagaaagtgagctgattccttggccgaggaggagacagctactgaaagagctatggagtgatttctgcactgatggtgggtgggcaggcaaagggaccattacatggctatgggggtaggctggaggcagactgggcactggtctaagaagtctcgatgtctggattcttaaccttgaaaatttgctgtgagcttcccacttgtggaactgaagcttggttattgctctctgagcctcaccacaggcatggtcaagaggaggcccccaggaagtgtttgatgaatgagtgaatgaatgaatgaatgaatgggagtgagtgcttgctcaccatctgcctcccttgaagtgcatctgtgcagccacacaggccttccctttggccagtgccacctgtctccccatatctcaccagctgacaactcagctgctcacccaaacccagggccggggtctttcccagcactgggaccagagaggcaaacacaggaaccatggcctgcatgccaggatgcccacattccagtcctggcttggcctcctaactgctgtgtgatctgaggcaagttactactcctctgaggtccccaggatgttcctgggactctgagtctacaaggcctggcctccccggggcccatggaacctgagccccagtcctgccttgggaatggaggccagagatggctgccttcctccctcacccctggggactgagcaggaatccaagtggcttccacattcaggaaaatccaaggggaaacccctacccagttccaaggaccccttctattcaccccttactgccaggcgctctcaggggctctttctccctctcctcgtggcaccatctctacctctgtttatctcgcccatttgccctctccttctcatgcccatttcacagattggcaaaggccagagtctggccactcctttttctctgtcctttctgtgacttcttttatgccagtgtgatgccaagataggagtgacgctgcagccacagactgtttgtttgcccttgcacaagtcattgcccctgtctggcctcagggtccccagctggagatgaagggtccccagctggaggtgaagggtccccgactggaggtgaagggcttggatgcagttttgaaggccccatagcccaggatctgagctgcctcctggtggtggtgctgacagcaggcaacaggcaaggactgcagcagtttttccacttggaaatgtgtttggcagttgcctcccctttgcgaggaagggttgttcggttctagagcgtggcgctgagggagacgggggaaatttgtgtgcccttggtgctctaagaacagccttaaccctgggctttcagggcggcatggggatgtaagcactgtcctgtctggcctcgtccgggcagcccctagacccaagactgtaccaaggcattttggacttttctgggagaaagtgacaggacactgggcatcttcctgcccagaacccaaacacacagccaacttgacagcattgccagcctcactccccgtgccagctctgcgtccttcagctcctccagcaacctgaaacgcgtggcaggagcaggcagcccagctggccctcacccgtctgacacgtgtgaccgtgcgggggctggtggggggagacagagagagatgcccagcgtgttctgcttatgattcaaaagtcctcagtcaatagcctttaagggaaagcatgggatatgcaacttacatggtgagaccagatttaggtaactaaatattcatgcatctaaaaaagtcagagaggatcaacatccagtgtaactcagctggggtgggaatggggcggcttttattttcatcttttttttttctagattgtttacagtgaggctactacctttgtaatcagaataaacccaaacatctgttttcaattaaaaaaaaagtttagaaaaatgaagtcccccccccacaacttctcctttcctgggagtctggtgcacagtttctctttctggctctgctgctcaggtgctgtgtgatctggagccagaccacaccctctctggtctccatccttgagggcagtgattagatggtctgtgaagttccatcagttagtggagtcctgcagcatggaatttcccaagggatgggctcctgtagcccaggtcagccctcctacccgctcctgctgcccaaaccccctctgactgctccctccccctccacctgccaccccagtgcttgtcctgtgtccccagtgggcccatctacaccgcaaacaagattcccaggccctcaaggaacttgccttccagaaaggcaagttcctttctgtccagaaacagacagcaagcttacaaacacatacacaaagcaggtcattccagagggaggtgagcctgccaagagaaaaaaaaaggcattggggagatagcacagggaggaaagagaatggtgcattttcactgggtggtcagggaaggcctcactggagaggtggcatttgagttgggatctcaatgacaaagagtcagccaagagaatatgtgtgtgtgggaggggttgggggaggcgctccaaaacaagagaccagcagaggcgctgaggctagaacaagcaaggcatgtcccaggaaaacacgcctggtggggcttggagcacagtgaaagataggtgagttggccgggtgcagtggctcacgcctgtaatcccagcactttgggaagccaaggcaggtggatcacctgaggtcaggagttcgagaccagcctgggcaacatggtgaaaccccgtgtctactaaagacacaaaaattagctgggcgtggtggtatgtgcctgtaatctcagatacttgggaggctgatgcaggagaacccaggaggcggaggttgcagtgagctgagatcatgccgctgcactccagcctgggtgacagaatgagactctgcggaagggagggagggagggagggagggagggagggtgggaggcagggagggagggagggaagactggtgagtccatgaagttagagggttctgggtagcttaggactttctccagggtcacagagaagccgcaggaggctgtacaccactagagggcagggtttctctcttatgagatcactctggtgttaagaggaaagtggattttaggggcaaaaggaaaggtagggagcccagagagaggaagggtccaggcgggaagacctgggcttggagactgcagcgggtggtgggggtggtcgtgcagtgtgaggcacatcttccaggttcatctagcagcaccaggtccctccagcagcacggactggaagtggggtgaaggaaagggagccaccaggcatcctcccagatgggacctgaacaactgggtgcttggcggagtctaagattgcagctcaaactcaccccatgccaaccctgggtcagggagaggtgacctataaaatagcaggtctgagtcacaggtggggagcctgccattgccttagggggacagcagcattaacaaaggcccaccctgagaaaggcactgtggtcccagcctgggtggggctctcagggtgtccccagagatagctgtggatgtaacctggctgggcatgtgtgtgtctgagggggcttgccacctgtcactgagtggggggccaggctggccccaggccttactcctggatctcggtttgggaggggcaggtccacagagcaagggaagccaagtgctggagtcaggaagctgagaccccgtcccctccagcaagctagggagctcctgagaggacagaacaatagctgtccctgctgggttttggtggctgtgacctcgaacacgccctttcactcttctgcctcgttttcgcatctgtaaaatggaacagcttcgcagggtcattgtgttgacaataatgtgcgctgtctcgttggaacacacaggattttcagtgccaggtggtgggaatatgcttattatctgcaggagcatggatgaaagggctttgagctccttgtctgggagaagaaggggaaacagaatatcccctcctcagggcccaggcctccatcacagtgaccccatcggacctgaaacttggaaaaggaaccaaaaattagccccaagactgagccaaaggaacccaaagccagaggaagggtctggagggagggccttgggggtggaagtcagggtggccagtgacccagtgactctagtgccctttccagctctgtaagcagcgtggcccccatagccaggcccgggctcatcccagcactgcacctgccctggggcctcgaccccagcctcccatccacttcttcacctgcctcacagtccttcgagggagacgtttcacaggagcagatggacacccccttcaggatgcaggcccctgccccagctggccaccttggcgaagccgcttcctgtgacagcagaggaagtgatgtcagggcacagatgggtgcagagggtgtgggaagagggctgcgtgaggagccacctttgttaggaatgacttggcgtcccccgagcccgccagcccccatttgtcatcggtaacggccattgtgaccgcctccgagggggcccctgcctgaaccccacagccgcaaggagccagggccagatggaggaagagctttgtgtccagggaggggtccttccatgtgaggttgtgtgtttttaaaacataataataaattggctcctctcccccaactctccccactccccactgagcacatcagccacgcagtgaatgggagagattttccatgcagtgggaggtcaagtctggggagaattagccggtgtccaggggctagagaaagactgtgattgctgatgataaatgtgcccagcgtggggcgtttctctgtcctcacctcccgcctgactcctcccctccctgtcctgagccagtcagccctggagacacacagccctgcatggctacagatgcccacccctggtggaagcctgggggtcccaggcctgtggacaaaagccagcggtgggggtttcaaggccttccctaccagaccacagcagcctccctctgaggtctccgccctgggcaacagggctgaccggaagtggacccggctgagatggatagcaggaatttccatcccaggcatgggaatcacagagcccaagccttcacccacaaccctgccgtggctgtgctgtctttctgggccccctgtccctcctcagtcctgaatcagcaactgggctctggtccagcttggctgttaatttgctgtgtggtgttgcattagtcacttcccctctctgatccggtagaacgcggggctccaagggctccaggctctctgaacgttgactttctgtgtctggtctacgtgggctcagatggtgccaggccaaggaaacagtctgtggggcttctgacctcccacacacagttcagctagagaacagctcctgcctgctgccactcccaggcacatgcactgcctgtttgtttgtttgtttgtttgtttgttttgagatggagtcttgctccattgcccaggctggaatgcaatagtgagatctcactcactgcaacttccacctcccaggtttaagcaattcttgtgcctcagccccccgagtagctgggattacaggcatccgccaccacacccagctaatttttgtatttttagtagagacaggctttcgccatgttatccaggcttgtctcgaactcctgacctcaggtgatccgcccgccttggacttccaaagtgctgggattataggcgtgagccgccgcgcccggcccacagtgcttgttaagaaagatatttgcatctgttttctcagttgacctttcacagcaataccccaaagttgacagagcaggaactgctagtcacttctttatagatggggaaactgaggctctgagaggtcaaacaacctcccaaggtctcacagtgctgggtgaggcttggaaccaggactgttggctcttgggtcagcctgggcccaggctcagagtcatggtaagggccacagcactcctctggcttcccctagggatagtgacaatctccctctcaggaatgttggagccaccccctcctctgagaagaccctctgagaggtacagtgtctttacatttgtcctgaagtcattccttcgcctcctgggccctcactcctgctcatccaggtgggtcagattctgacacctcttatacaagcttgtgtctccacagcaggcactgcacaggcccagcccctgggaagaagcctacagacgggcacagggcctgctgtccgacaagctccactccactcctagacgggcgccctgttgcccatgggggacaccaggaagaacatagtgtgttccctgccctccaggagcagccaccaaaactgcaaaggaggctttgagctgtctgactcaaaacagacttgccagaagcaggaaggtgccctctagaccctagcctggtcacctcaccctcctgcattttaaatgggtgggtgacatgaggaacttgtccataaggaagccagcatggaggtgagaggtgcaaaactgtgtcttctagagaatatttggataagacagactgggggaccaggctgcaacctccagactgggaagtgcactgtttagttagaagtgtgctgtttagttagtttagaagttagaattctaggctgggtgcggtggctcatgcctgtaatcccagcactttgggaggccaaggcagttggatcatgagatcaggagttcaagaccagcctggccaagatagtgaaaccctgtctctactaaaaatacaaaaattagccagttgtggtggcgggtgcctgtaatcccagctactcagggggctgaggcagagagttgcttgaacccgggaggcggaggttgcagtgagccgagattgcaccactgcactccagctgggccacagagcgagactctgtctcaaaaaaaaaaaaaaataaaataaaatagaaattagaagtctagcaatggctgaatctcaaattgcagctgtgagtaaggaaggcttttctaactattaggtctgtccgaagaagaacctggctgagaaaagcagtgatgaattccccatccccacaggtatgtgagtcaaggttggctgaggagttgatgggagacgttggatgagatggccctttaagtaacttctatagagacttcataaagaggtctcatgtagagacctcataaagagacctcataaagaggcaggtaaaggcaaattagaggtgagagtttggatggcacccctcggaggtcccatccagaggtgctggtggtcattttgatctaaggcctgggatgggtgggctggagcatggttaggcgagcccaacagtgtttcctcctcctccttccctgggttctacctacgctctgctttaggaccaccgtatagcaatggcaaggaaagtgaccctaatttaagcaaatttgctttctgaagaaaaaaatttactcaacaggacattttcacacatgaacagattccccataagggatctttaaacctcaaagtgttagaagcagaggagggcttgagagactgacttggccaacctcctcattttacagacagaaactccagggcctgggagagaatggccacacagcaatgccagtccccagctgggatgcaaacccagggcctctgcctccagcgatctttcgtgtccttcatttgactgtcttgtcattacatctgtgcagggatgtgtcttctttcatagcttcttggcgggatatctggaccattcttggatgcagctttaaaggcaggctgcacttttgcaatttaggcccaaacgagttctactcttgggaaaaaacacttcatgtgggaattttcctgccagcaggaaacccagatccggcctggctgaggcaagaacttctaggggagcctgtcttagatgtggttcctctgtagagacggagcagcaggaagtcctgcagagaggccagggaggcagggctgagagacatggctcaagccttgcttcctgccatcgaccaggtgacccttcatgtcccttgttgcccctcgttttcatttgtaaaatgggaagaattgcaaggagtagcacatagtagacctaaatgcccatttccagttcagcagagctcggaagacagattctagtatcagatcacctgaatttgccccctagcggtgccacttactagctttatagctctatgccagtcacttaaacgcttttggtctcagtttcctcatctgcactgtggggataataatcatatccaactcataggcttgtggttcccaaactacctgccaagttatcccagggttcatcagcacactcacagggaagctgtgggatatttttaatgtgggagacacggtaatactagatagctgtcagacactgcaccaacaagtagctccaggtagctcagtttcagcatcatatcactctgttttcctttatttggcaccatatctttgcaaagctgggattgtggcacttgagtaacccatgacaaacagtaagaatagtggtgtccgcttggattccaaagtttgagaagttgtgcagtgcccgacaggtgcacacatccctgttcgtaagtctttgtggctattaggaatgggataaaaatatattttttctttcaatttatcctaagattttaggatataaatatttacaaagctgtttggatctaattacctaatacattcctgttagggacttctttttggccttgggatagcttaaaaaaaattactgaggcactaaaaatcaaaacgtttgtgcatctctgtctagggttattatggagctcattgagttcatatgaaccactctctgagcggcgcctggcagggtaagcatccaggaaccccgagaccccattattctcccacccagctggtatccgtgcagcctggccataggtcgctctcatctagcccacctttcaagccttcctcagtcactggggcccaagccagggccaaggagaagtgagggctctcgttgttttggaaacagagtctcactttgtcgcccaggctggagtgcagtggtgcgatctccactcactgcaacctccgcctctcgggttcaagcagttctcccacctcagcctcccgagtagctgggattagaggtgcacaccaccatgcccggctaatttttgtatttttagtagagatggggttccaccgcgatggcctggctggtctcgagctcctgagctcaggcagtccacccacctcggcctcccaaaatgctgggattacaggcgtgagccactgcgcccggcctactcccttactgaagttgcattcactgtgcacctgctgtgtgctggccagcagagtccactcatggtccctccaggcaggaacctcaggtgggcctctcattcttccttatgtcctggcagtctctgcctccaggacacctagggtatagggacagcaagagggcaacagctacatcaagagccatccggtactgctgcaacagagaggcacagaggggacacttggcctgcgcccctgccaaggccagagctgaatctttgcaccagggctgagaggaggggcggggtaggaagagtagggcggtggggctgccagacgcagggcctgctgcactaatggatgtctaatgtttgctttcctcagtcatgtctgcacccacttaataaatggtctgcattagagttataaaacaaagtcataatacagcctgcagtgctgcagagcacagaggcggctgtcaccccggggctgggggtggtgcggttagaagatgggggcaggcacgtgacatgcacccatgggcccccatgccccttctcctgtggccatgacctgcccccagagggaggctcaatcctgccatttcaaagatgagctgcctgaggccagcaaggggctggttcagacccaggggcctcttgagtctgaaggcagagctctgtcccacacccctcagggctgagacggagacaagatgctggtggtgggtggtgggcatggagcctggcaggttctctgctgcccagatgccctcctggctccatcctgctatctcagagctgtctggcctggcagggaggcctcagtggccatctcagggcatgcacagcaaccagctctcaggccactgaaagccaatgttcagctccctgggttgtgatcaagtcactgtgtcatctcctcatcaaatccccaagcagccctagggggctaccagtttgcctatagtgaatgtatccctgtacctggcagtgggaagcaggtgtcagggagccctggcctggcctcaggaatctgccttgctcttcccacattagctacccactcaccgggtggcctcgggcaagtcatgggaaccatctgaatggtcttcagtttcctctgctttgaaatgaggacatttccagccttgcaggtcccttgatgagagagccctgtggactgtggagttctggccctgtcagggtgctattaggattcctgggtgtggagacacctacaccattacagagctacgtagatcaatgataggtggtgtggagtctggggcaacagcccaaacgctgaagtcttttctcaggttcaaacttttgatctgcctcttgttagctgtatgaccttggacaagttgcttaacctccctgagcctcccatttacccatctctaaaatggggtctaatagaacataccttacagggttggtgccagaattcgataagttaacaacttaaattcctgcaaacatagcacctgatgctgggtgagccttagttgttcgttcgatgcagcaacatgtacgtacctactgtgtgccaggcaccgcctaggtgttcatgcatgtttgtctcatcctcagagcagcccagagacggggtaaggttgtccacctcttgtgctcatcagacataacgaggtaggtgttaaggttctctccctgggccctacagaacatgctggatggagctggagtcatgtgtcatcttgttagctaccccacccccaccgcccgtacacacactgcccagggcctaggccccaagccagtgatagttcatgcattttctcctaagctccccagtctcagcatggtctcctggtccacaaagagaaagcatagtcagacattctgttcttggaaaaccaggtgtccccttggcccctctgactgtaggggggactccctagagccagatgtggcctcctagaccagagaacaagtgcacgatcccagtggccacacaggcctcccgggacaccacccgctcccctccctccgctgtaggtggggcctctagctggaggggctgggcggccatgcgccaccccacagcttcattcactgtgtcctctgggcagttagcagaagaggacaagcccccaacggcttgtgcccagccacctgatcatttggcatttggcactggaaaattcatttttctaggtggattgtaaaccagcaggtcaatggcctggtttcccccgcttctgggcactggcggtggccacaccccccttcctgtttgtctcacctcctgaggtgcagttctttccagggagacggtgggccaggatttccatctggccccctttgtgggaggagactgccacaggcacagcccccatctgctctgaagtctcctcatctgctgtgctgagggctggatctggctggggtgggggttgggaagaagaggccaagggatgggtgagagccacagaccatgggaggtgagctctgtgaggaagcttctgggaaggagggcttcccctgggagaggagacctgcagggggctgagcaccatggagtccaggcctgcttcagccggctcatcccacccctgccccgcagccctggctcctgtcccgcttgccagcctggcaggggctgcaaagggcagctgtgactccagggcagagctggcctggtttgagctccagccccgtttccagcccattgcatctcgtggcgtcaccatgaggaactggatagaagccgggcagggacagtggagcagacgttgtgggggggcccaaggggtgtcctcacccagacagatcgcctcccctcccgggacctccttggcctctctgtctgtaatgaagtacagtcacacagcattgcagagtgggaactggctctttataaagcccagcctcttaaaagcagggcaagatgggaaactgaggccgcaggagtgccagacttgaccccggttgcagattacgtccccaggagggctctggctgccccacctctgcctcccctgtcctcttcgtctgcggtgggcccccggggtgggcgaggggtgccacagggccctcccagcacacagcctcatggaggtctccactcactctgcaggcactgattctggcagcgaggtgctccctgactccttcccgtcagcgccagcagagccgctgccctacttcctgcaggagccacaggacgcctacattgtgaagaacaagcctgtggagctccgctgccgcgccttccccgccacacagatctacttcaagtgcaacggcgagtgggtcagccagaacgaccacgtcacacaggaaggcctggatgaggccaccggtgagcccgccccacttgcctgggcaccccaggacaccccaggcccagaggcacaggcctagctccatgtgagacttcacacagccatggtgcccccttggattagcatttccccaagtgctggccacatgtcccagcctgactttgggaccatctccactgcattggacagcaccgagtgccctgtgagccctcactcccttttccactttccatctttctgcttctgttagggagcaagttcccgtcaggtgggggttcttgagccctcccaaacacctgctaatctccctgtttaacaaagagggcaggtctctgcctcacagccctggcaccccacggcaccgacccagaattcaatgcaatcgttatttttacagttcccttctgtttgtggaaagtgatactggtttccattcacaataatgatatggcatttcctgtgttgaaataaattgttttaggttaaaaagaaaaagttgatagtattaagtaaataaccatccaagtggtgctgggatgtagaccaaatctggagggaaagaggagagcagctgaaactgggaaactcgaggaagcctggggtcccttccttctcggatatgtggggagctctcggtactcccagaggaggaggcagagccctggggctccccacatctcccagaactgggcctgcccccagggtgccctcgagtctaagtgaggggctcttgctcacttgtcaccaggtccctgttgatagtgcaggagccctcggggtgaaaagcccttcctggggcttaagacaggcagatgggacccccccttcagtcacctgacagagccagcctaccccagactcagggggctcccgagtagccttcctgggttttgttttgtttttcccgtctctttctggatcctttgctttctccttcttcagctctgtttatttccctgcctctccctgctcatttctctctctctcttttccctatgtgcctgttttgcttctttctttttctcttcatccccctctctctgtctcactctctgtctccctgacatgctgtctcactgtccttctttcccccttctttagtttctgttttgtcatgtaaagctcacagatttcagaaacagtcaggcttaaaaccatactctagaatgtactcgaggtcactgaaccatatgcttacaaatggttaaaatgctaagttttatagaatgtgtattttaccacaatttaaacataattttaaacaatagatttggagtcccatgctcacccaaaatataaaaatggaaaaaggaatttttttttttttttggagacagagtctcgctctgtcacccgggctagagtacagtggcgcaatctcggctcactgcaacctccgcctcccagattcaagcaattctcctacctcagcctcccaagtagctgggactacaggcgcgtgccaccatgccaggctaattttttgtatttttagtaaagttgggatttcaccgtgttagccaggatggtctcaatctcctgacctcgtgatcccccggccttggcctcccaaagtgctgggattacaggcgtgagccaccacacccagctagaaaaaggaatttttaaggggaaacaaaacaacacatattttccagctgcccccactctttttctgagtgaccctggggaagtcactcaacctctctgagccccagttcttctcttcgtaaactgggaagttgactgaaggtcctggtgagggtagagccaggtggcgtacacatagcacagaacagcatgccagggcccagcaggcagtcgataaacacctgcttcctctgtcctctttccgggctttccttggcctctttctctcaaacggtccttacctctctgcccactgagcccctctggcctgtatcagaggtcagccatcggggtccaggcaaggcgagggaacagtgtgcctgctggggcccctcacaggccgttagcatagtaataataaccctgtgattattactaatagtaacagcatggcccttaccaaaaccctgccaccaggcacacaggccctgccagccctagaaattggggcactgttgtccccattagctgcaaataatgggcagagcttccttggcagtggtggggcctgattccacttcagcctcctactctctagccttggtctgaggcctgaaaacacagaagaggacagctgggggccaggagaggcagaacagccccccaccagcttatgccagattggggcaggcagcccaaccctgggtgtcctgggccaggcattgccatgcttgggagggcagtctgatgctgggcctcaagcctgggagaccgaaggtccctgtcctatgctccctgcatctctgcttgctggtgatcatggatgaggtgtcacgcctcctccctggtggttgtttccttctatccagctattggtgctgctgaaaccttcttgcatggatgacccccttaaaagggcacactcttacaggttcacagtctggtaagcaaggggcaggggctgtgctccctgggtcatgcatcattgactgtggagccagcctgtgggcagccatggcaggcaggcactgtcacccacccctgaagcagcctcttccctggatggcatacccctagccacctcccatttacatccttggccatcaggacggggctgtcccccatctggactccctgcacaaggaccccaccctcctcaacaataggagagttacagcaatgacttcatcaggagaggtccagagaggagttgtggggccgggcgcagtggctcatgcctgtaatcccagcactttgggaggccgaggcgggcaattcacgaggtcaggagatcgagaccatcctggctaacacagtgaaactgtgtctctacaaaaaaatacaaaaaaaaattagccaggcgtggtggcaggcgcctgtagtcccagctactcgggaggctgaagcaggagaattgtgtgaacccaggaggcggaggttgcagtgagccgagattgcgccgctgcactccagcctgggcaacagagcgagactccgtctcaaaaaaaaaaagagaggagttgtgggtgaggggaccaagctctaacctgggaaagacaccagggagctgacctctgctctgcaacagcttgctaggggacttggtgcctgccacctaccctctctgagcctcagtttcttcaaaggtaacagaagaagctggttgagatccagatgacctgccagagtatatttgtgtctggcccgggctgggcgctgtggcggagtagtcaccataacttgtctagagtttaccttgagagtttactatgatgagggatctgaggctcagagagactgagtaacttcacaaaggtcacccagctggggtttgagggtggggccaggacacaaacctgtccagccatccaaccctgtccttacccaccatgccaccggctgtgcgtaccttaacaatccatggtgcaatgagaggatgagataggacacatcgtggcagggaggagcagctttagaaattctgagacacaaggcagtcagggaggcttcctggaggaggaagagggctctgtaacctttggggaggaacttcagatgaatgtcccctttcctggcaggttcccccctttcctgagcatggagggcttcgttgagggatggttaacagaaaaccgagtgacccccttgtgtaggccggtaggtcctgttatgtagggagtttcccaggccctgaccggggagccattgagagatcaggggctccctgggagagggacttcctcagctccaggcccacagggcctgagtagtgaccagggagagcaggcatcccacctctgcacgtgctgagccccctttctgtgccaagccctgggccacagcagcaagcaggacaaagccccatcttgttctcctgcaggagacagacatttaacacatgaatgcgtccataaataatctgagtccagctaatggtgggtgctgggaggagacgaagctgggtaggggagtgactgctgcatagacgaacttccgggcacagtggtgggagtgccgagcagtgctgggagagctgtcggggaggcgcagggtggagggggctttcctcgggaagtgaggctgatccgaaatctggcagggactgggaggccaccaggcccagaggagacagaagattccaggcaggggactgatgtgcaagggccccgtggctgcagagccagggaacatgagggcctggaagacacccggtgaggctgcagtgggatggggatggtggatgcacagtgcagctcagagccactcctggggatgaccctacccgcctgcaggccactgagaccccgcatgaagggtctcataacggggggaatgacacaccacttgtgcattttggagatgacactagctgccaggtagaagatgcattggtggggcagagggcttgtgttagccactgcaatgtgcaggtgagtggccatgaagcttgagccagggtggagacaggagacaagaggaatggagggaaaggcacttgggcaagagtgccagcaggatccgaggtggaaggccgggggtgtcctgtgcctcacatccttgctttgcccctgccccctgacggctctctcttctcctcccaggcctgcgggtgcgcgaggtgcagatcgaggtgtcgcggcagcaggtggaggagctctttgggctggaggattactggtgccagtgcgtggcctggagctccgcgggcaccaccaagagtcgccgagcctacgtccgcatcgcctgtacgccaccctgacccccaccctgtccctgcaggaaccttccccatccctgaggatgctggagagggaacttcacatctgtggggcctcctccagcatccctggctgaggatgcccacggcagagacatcccagcacatggatgccagctcagagagggctcctagacccagaacctaggcctcttttcatctacttctgtataaaagaagctggcagcttcctcccccatcctgagccactatatgcttaggatcccagagtcagggagggaaccctgttcccccaagtctgcctagtgagacccctcctttggagaagaggaaatttcccaggcaaaggccaggtgggcccatcaacagtaccctgggtctgcactgccacccagtggctacagtgtagcacatcaggttctgatcctgcccgcacctgactgccttgggaccctctcgcttctcccagacctgcgcaagaacttcgatcaggagcctctgggcaaggaggtgcccctggaccatgaggttctcctgcagtgccgcccgccggagggggtgcctgtggccgaggtgagcggggacgtagggaccactgagcacggccctgtggccatgcctgcagaagccaggcaggcatggtatttaccaccagccatggtgctagtctcccagagccctgcccctttcgcagatgagatcgaggcttagcacagagaagagaactgttacctctgtcgaacgcagcaatgccagatcccagctgggtctgccacaggcataaccccacgggatggggtggctaaggcagaaatccccagaactcaggggctccttaggtagacctccagctcagtctctatctcctgccccacccagaacccaaggccccagctttctggatgcgaaaggatcccatcatgcgtgtgtgtgagtgtgttctcccccacgagctgatcaccccttcctgaaaccacagtctttggattgctgtcctctctcgccatccttacctatgttccagacatactccctgcactggtggtccagggattagagctgcatctcagctttgcccagcagagtggacggctggggcagtcaggaccctgacttccagcctgggatcagccctctctgatcccaaaaccatgcactcatcattcagcctctcccagcccaaaccctcctctgcgtagtgggctcagacaaatacccctggcccatatatgctaggcacttagcacgctggtctctgcaacaaccctgcaaagtggatgttaccattccatcccacagcaaggaagcagggctgggaggggcccagtggccacctagggtgaggcagctggtgagtggcagagctggggtttggacccaggtctgccagacccggggaccttcttcgtatcacctcccaggcttttcttcctggctagcagagctgggaggagttaatgatgaagacagatactcctggctagcacctatttagttagtttaactcaacttcctctgagcattgttctcggcaccttacacatgctaactcatgtaatcctcgcgatggatccctatggggtaggtgctattcaattccatcttgcagttgatgaaattgagtccctgagtggtaagtcccctcccaagaccacccagctggcaaatggtgctcttaaccccagagctgtacagtgtccagtgctatagtcccaccaaggccctgcctcactgccacgactatggcgtggacccaggtagaactgcccttcttctgtttatgatcaaacctgtcctgggccctcactgccccctcacccccactcttgcaggtggaatggctcaagaatgaggatgtcatcgaccccacccaggacaccaacttcctgctcaccatcgaccacaacctcatcatccgccaggcccgcctgtcggacactgccaactatacctgcgtggccaagaacatcgtggccaaacgccggagcaccactgccaccgtcatcgtctacggtgcgggcctttcggagtgggaggggcagacacggccaagggagggaggagagagcctgggggtaggggggacccctggattggtagggaggatgcagcccagagaggggaagtgaattgaccaagatcacaacacagcagaattcatggccaagttgggcattcctgggttcccagccaggaacactccccagttctcaagatgccttgcctaactctgaaggagttctccaagtctgggggctgaggcagggcccagtcagtatgtccagaaggctgttgtcctggtagagttaaggaccattgcccaggcttgtgagctattctctgctgcccccttgggccctatgggtgggaggagtggagccacagctgaggtgacttgacagagttttagaaagaaccttgtgctaggttccagctgcaggcagtcccaggcccccatcactcccagggtgaccctggggaagtggcagccctttctggaccttctttgccgtcttacaatgaggtggggcatagacagtgacttcccggatcccctctggtgctgacggttacagcccagctctatctgccagttctgagtccctacactgtaggcaaaaggggtctcactaggaaggccaggcttcagcagaggggcctcgtcagggtgagggacgggtttgggggagggcagagggttccagagccaagccatccagttgacagctgccgccttgcagtgaatggcggctggtccagctgggcagagtggtcaccctgctccaaccgctgtggccgaggctggcagaagcgcacccggacctgcaccaaccccgctccactcaacggaggggccttctgcgagggccaggcattccagaagaccgcctgcaccaccatctgcccaggtaaggagccttgtccatgtccagccccaccccgaaccctgtcccaccttctgttttgtgtgccagagccgggacagccattctctccccagcatggggagcagaaggtgcttgtcccgagcccacagccggctgcccaggctgactagatgctctgatctctgaccccttattctgccctgggctgctggtgagatggaggcagaggctttgagggttagccccttctccctgaccctctagcctgggctcttctgccctccaagctgagggttctcagtgtcagcatgtcagccccaggccaaggtttcagagctccccggcctcagggacagcctgttgctcctgactgttaagacacaccgtggccacagaccctattcatactgacagtcctcctattcctctcatcctctgtgcagcccctctgctcccctacccccgcacatgtgctgtgttctctcccttgggttgtatgtttgtgcctacgctgtttttctttaccctgggtttgtgtctgtgtgtgtaaatcgtgcactgggctatatcgtgttgatgaccttatacatctatctgtaccctctttgtccacctgccaggtgcatctggctgttcattggcatggggttatgtggatatcatgtggatttctctgtgtggcacacatgtgttctgggttcctcatttccttccatggtgtgtatgcatgcatgtgtgttggcacattgctctgttctgcacacataactatgtgtgcacatgtctctgcgtgcacatgctcctgtatgccatgctcttacagtcgatggggcgtggacggagtggagcaagtggtcagcctgcagcactgagtgtgcccactggcgtagccgcgagtgcatggcgcccccaccccagaacggaggccgtgactgcagcgggacgctgctcgactctaagaactgcacagatgggctgtgcatgcaaagtgagtcacagggaaggtggggccctgggggtggggactctggagccatgtaagggtcccccaaacccggccccatgcctcagtgcccagcctgcagcacggcagtcctcagggcctctgtccccccaccacatccatcatctcatctcatccttcccattgccttctctgccaccctttccctgtcacctatgtcattgtctttccctttatttcccttgacagataagaaaactctaagcgaccccaacagccaccgtaagtcccatttcatggctgtcctctttcctctgggggatccctggttctctttggctggcttttcccgggatcagggtgcagggcagggagagctgaaggtgcctacccaccccccacgggatcatctacacctgacactgcatgtgtctgcatctccatcaccggcagacaggcaaacccttggctgacagaaaagaaaggccttagggcaccctactgagcctcctctcataagaggggaaactgagtcacagagagaggaagggacttggccagagacacaggcaagaaatagtagagccaagatttgaacccaaatatttttatagccaaagctgttgttcttaaccatatgcccttggccctcctctctgggccaaggccgggacatcaccactccagtcccccctcatgccccttgctgtacctctctgccccagcagctgggccaagcctcccaaattgtctctgttgcccgctgccctgcgtcagctctggagggctcaccctccagccccagaggctgcgccaccactgcaatcatatcagagcagcaaagccacttgagcaggttggcccatggtaattaaaccacaatttccagttagttctggaatcataaaatcagtgaggccctcggccgagctcactgggggtcgggctggggatgattcaagtgtaagtcaccaggcaagtggccccagtgtcagtgaaggcattaggaggcagagccaagctgggggaaccatttctctgctgaaccaggagcccagccctgaggggtcctctggggagcccaagagtgagggctgctgaggagagatacagggggacagaagtcggaagtgggcagacatccggggctgggagccatgccctgccttgctgaaagccttaggctgacgccaagtgcagggtgtggaggactccaggcagaggaagcagggctacttctctgagggccccccagggaggaagtgcgtggacaggtgcttcctggagctcccaaaggaagcaaggggaagagcagccatcttggccgccatttttgctctccctgaactgcccagtgtgaaagccgttcaaacttatacttagcttaattaaaattaaataaatttttaaattcagttcctcagcggtactggctacatttgagttgttcaggagccatatgtgactagtggctgcatacgggacagtgcagccataggattttctaccactgtagaaagctccaccagacaaccctacttcagaccctgccactttgaccttgaggcttcccgcctggccatgtttgcctgggggaggaaagtgtagccgtgggttgcctccctgggcccatccttcttcccacatgctcacctcttctccaccgcattgttgtgcatctcattccacttcttcagctccccgtccctccacttcccaccctcagagcatggaatggaagaagagttcagaacagctacttacaaagataacagagccagaagaccttatctacatacaaagataacagagccaggacctttggtcctctggaaattgctacagactcagaggtttcagccccagcactcacagggcaaattatgtagccccagtgactctgagccacagaccctgtctcatcagcagcaagcaatgaattaacacatggcatgaacatgtttgttcttttgtttctcatgccacaactaggagggcagtaaggcagggacttcgagcccattttaccgatagagaggttcaaggctagcccgaggttgccagcctgtgtaggcagggctcagactggaactcagcaccgggccggttggccctgggccctgccctttccagggacccagggcctccctgattgccccagggcctggtctctgctgccccttatgtggtcctcctgtccccgcagtgctggaggcctcaggggatgcggcgctgtatgcggggctcgtggtggccatcttcgtggtcgtggcaatcctcatggcggtgggggtggtggtgtaccgccgcaactgccgtgacttcgacacagacatcactgactcatctgctgccctgactggtggtttccaccccgtcaactttaagacggcaaggcccagtaagaacccgaggatgtctggggtggttggcagaggcaggatacccagagggctctggtggtacccagaccagagccaggctcctgactccctcccagggtttttccagagtttgctctagagataactatgtggatgggtatggattagagaactaccgagaaggaagggagtgacccaggctgcgggattcccaaagcttcctgcagctggcagcaattgggcctttcacagctggacatttgggtgggattttgcagtgggagctgggccagtgagctgaggcacagctgggtctgactatagcccctactcctgcaggcaacccgcagctcctacacccctctgtgcctcctgacctgacagccagcgccggcatctaccgcggacccgtgtatgccctgcaggactccaccgacaaaatccccatgaccaactctcctctgctggaccccttacccagccttaaggtcaaggtctacagctccagcaccacgggctctgggccaggcctggcagatggggctgacctgctgggggtcttgccgcctggcacataccctagcgatttcgcccgggacacccacttcctgcacctgcgcagcgccagcctcggttcccagcagctcttgggcctgccccgagacccagggagcagcgtcagcggcacctttggctgcctgggtgggaggctcagcatccccggcacaggtgagcccctgccctgcttgtgcgtcagcctggccttagcacctcctctgtggactgccccaacacccatccagcagaagatagggctgccctaatcccatctcacagatggggaaagggaggcctgaaggcaggaagtgagtataaaatagagaggtctgactagaaaagctaggcttcaagcctgcctatgccctcactagggcagaggaaccttgggccagccatcttctaagcttcagtgtctctgttgtgtgagagagaatattccaacgtagttcagcagacctacaaagcactgtcctggaactagcagcagagggacaggggcgcctgttttagtttgcaaagccagcaattaacagcttcccagcatcatatactaagctaggagtagagctggcacttggacctccagacaccatagcaatgtcagagacccctgtcttcctagacaagccagcactggtcagtggcctggcctctgcttgcatccagtccccagaccctgtctcccacccctggctggggactacctggagctcaggagatatctttctctcccagccccaagctggggccaacttcccaaacacttgttctcctaagctcctggactccctgctgacttccctctccccctaggggtcagcttgctggtgcccaatggagccattccccagggcaagttctacgagatgtatctactcatcaacaaggcagaaagtaccctgtgagtagagccccagccgctgctcctttttcttcctcccatcccttgctgcctgcccacacgtggctccccttctaagcctgatgccaagaccaaacagtcctccaaggaaagtattaatcttactgtgtccatattgaaaacttgcagaaccaacaccgtaaattgtaaaactcaaaggcggttgacaagctggctacaagtgtgacaaagggctgaatatccttactatgtaaagagattttgtagatcaataagaaaaagtaaacatctcactgtgaaaatgggcaaaggatatgaacacgtgattcacacacactgtctcacacaaacacactggccagtaggttatgagaaaatgtttagtctaatttgcagagaaaactaatgaaaaccaccacaaggtatactgggatttttaaattattattattaaggaatttgcaaggaccttttcccaaatgataataccctcttgctggcaagggggtgggaacatggccttctgtggcacgtggccgggagtatagattggaaccagctccctggagggcactttagcgtgacctattgaaaaccttccaagattacacaaccttggaaaatataagccaggaattttgagctatgataatgttgcagtggaatagcaaaaatctggaaacaacctcaaggttcatgccattttctttgcctcctttgcccccatgacctctgggaatgcagagccctgagtggcaaagagctgccctccacctcccgggccctgggcagacttgggagcccagcaggagcctgcacctttgccgagctcttcactgcctctctcctaccctgtgtcctcctccagcccgctttcagaagggacccagacagtattgagcccctcggtgacctgtggacccacaggcctcctgctgtgccgccccgtcatcctcaccatgccccactgtgccgaagtcagtgcccgtgactggatctttcagctcaagacccaggcccaccagggccactgggaggtgaggagccacggtgaaggctggcccagctctcccaacctgcccagggaggcaaaagaaagcccttttcctctggcccagcctgaataactgtgaccactaccccacccttgctgtcccctacaggaggtggtgaccctggatgaggagaccctgaacacaccctgctactgccagctggagcccagggcctgtcacatcctgctggaccagctgggcacctacgtgttcacgggcgagtcctattcccgctcagcagtcaagcggctccagctggccgtcttcgcccccgccctctgcacctccctggagtacagcctccgggtctactgcctggaggacacgcctgtagcactgaaggtagggccagctgcaggtgcccacacagccctggccggccagctgcatgatccctgccagaatcccccaccccaggctcatgggtcctcccaggaacccctccccgccaccagcattattaggtcccgcttgcgaccctcacacactgaaacagccttgggcacagggcctgcctcaccaagatccaggttagaggtgggaggcagaccagggatccctgaaggctctgatggggtctgccccaggactgagggagcatcagactgggaggggcttgggctggtagggagggactctgagaaggctgacatgtaggagtttcagcagaaaggagtgaagggcattccagaccgacagaaatgactgcgtttcataagcgtttcagcatgaccaactaaaaggcatagggaatgtgtgaatgtgagggcgggcgagatgggcagggctcagcttcccagaagcctcagggccccttgccaaggaatttggaatccatccggcaggaaggggaatggacctggtagacacctgttcacaggtgctctttagaaagcccctgtggctatacttgggtgggtagatgagaggtggagaggcctgttgggaagctggggttggaccctgggccacagggagtgacagcagccaggagaggcggggctggatgctgcgtgtgctcagtcaaatggacagaaccggtgactgatgggatgggcagtgggagagggaagttaaggctgacagccaggctcctagcatatgcagaaggatggagagcggtgccccaagtgaaggaagggtcatgcagatgaggggtggttgggacaggagggagggaaggggagggaagggtcttttagtacctagagcctgatgatggcaggtatggagccccgtgttagcaccactgtcccctgccagcctcagagcccttgtgcattcccccaagttctcctcccattctcaggagctcaggctcatcctgatgtaaccctggaagcatacagacacttggccgtgtgtgagccccttcccctccctcctcccatctgccctcctcagcgcctcatggtcctttcccatggctccatgcactttctgttcctgctccctggccccgtccagctccttcatctcccaggctcatgggacttgtcccaaagcccacactgcagacaacataggtgaaaggcccatgggagaaggagtgtcccctgctgggaggaccctggcttgagatgccagtggccctgtgatgggtgcaaggtgcctgggaagtgctcctgcagctggatctcttggtcctggggcgttggctaatggccagctttggccagagagtggtatagaaatcaagagagaagttaccaggtttgggcctgatggcattctttgtttattcaaccctccatccatccatctgtccatctgttcatccatccatctgtctttctgttcatctgaccatatacccattcagtcagcagcccatctgtttacccagtcattgctcgtctatccattcatttatcttttcttccatctttctattcatatacccatccttgtatatccatctgtatattcatctgtctgtctttctagccatcaatccgtttatccatccatctgtccatttattagtccctctagccatacggtcatctatagattcattcatctagtcatctttcccactgtctgtctatccatccgtcatctattcatcttctcacaccataagccctctgtgagctcttgcaaatgcccagccatgcactcagatgggcccctgccccctgccccgcacagtgccacagaagaggcccattggccaggtgtgatgggttccccttccccatgcccctggcccacaggaggtgctggagctggagcggactctgggcggatacttggtggaggagccgaaaccgctaatgttcaaggacagttaccacaacctgcgcctctccctccatgacctcccccatgcccattggaggagcaagctgctggccaaataccaggtgagggctgggctgatggatggggaggggcaccacttaagggctgcccgggaagcccagctccctcccgggccctgcctcctagctctgtcctgtggccttacccctccctggatctctcactgtctctgtctcctcccaccccagtctctaggctttcagccatccccaggcacgtccccaaattcagggcaatgggcagccacatgcacacttctgccctgtcacaccctcacacgcacagacgactatgcccttcatcctcacagaggctcctcacccttcagggcatgccctcctggcagactgcccatctcatctctgacagccacagcccgctgcccacccagcagcgcctgagaccacaaggccccctagcccctgacacacacacacctgtgcctttccctcccccacctacccaccctcagctcccttctggaactgagggcctgacaccaactcagctggctagcttagggcacttgacccctccctatctgggtggagaggcctgaactgccccccaaagctcccaaccctccctgagcctccatttctatgaggacagggcaggctggccttgcctgcctggtcctgaccccctcctcctgcaggagatccccttctatcacatttggagtggcagccagaaggccctccactgcactttcaccctggagaggcacagcttggcctccacagagctcacctgcaagatctgcgtgcggcaagtggaaggggagggccagatattccagctgcataccactctggcagaggtgagggaagtcggggccacatattccagctgcacaccacactggcggaggtgagggaagggtggggcagatattccagctgcacaccacgctggcggaggtgagggaagggtggggcagatattccagctgcacaccacgctggcggaggtgagggaagggtggggcagatattccagctgcacaccacgctggcggaggtgagggaagggcggccagatattccggctgcacaccactctggtggaggtgagggaagggcggccagatattccggctgcacagcactgtggcataggtgagggaagggccgccagatattccagctgcacaccacgctggtggaggtgagggccagaggatacctctagggtttggggctgggctgcagcacacagaaccctgtagttccctctcacctcccaagtctgagcgggtatctggtcatgtttttctaacaagtgtcatttattgattgagtgccattcacatgcttggcatataccaaaaaacttacatgatctcacaagcaccgggagatgcatgacagatatcatccccacctgggaggtgagaaagtaggttttaggaagggcaaggatttgcacacagtacaccagtggcaagactggattcgaacccaggttgatgcaaggaccaggcctgtggttctcaaccgttaaaaatccggattgagatttaaaaacccaggccacccagggtgacaacactagatcctcctcttggggcattgtaaagagcactggatacaggtctggacccaggtctgccactaacttggcatgtggccatgagcaagccactccccttttctagacttcactttccacctgtacaagagggtgcatgtggattagactgtggctgggcctccttggggcttcctaaccatgaggctgcatctgcatttgcctggggccttaggtaagcatggtgcaccccctgaggcctgaagggtggccatgcaggccttgcccttgggaaccgacccttcaagggagaagcccctgcctgaacagtgggagtctgtccagaggaggtgggagtgactcaaggctcaatgagctcacagtccaaggggagggaggctggagggcagatgcccagcactgtgcccctctcactcttggcccccacccttgcagacacctgctggctccctggacactctctgctctgcccctggcagcactgtcaccacccagctgggaccttatgccttcaagatcccactgtccatccgccagaagatatgcaacagcctagatgcccccaactcacggggcaatgactggcggatgttagcacagaagctctctatggaccggtgagtatcccaaaccacagcccatccccatctgccttcgtcctcaaggtctcacaggggcaggcagggcaggcagcctgacagccacgaccatctcccagaccagctgcccttttgccaccatttgtggcaaatcagcaactcaggattggatatgcaaagttcaagaatactgctcccttgaggagcatcatgctcagagcactggtccttgagccaggcagactctcagaccctgctcttttcccattgtgtggggataatgctccacctgcccatctcaccgaacagcaggagactcaaagccagggcatcagcttggtgccatcattgtcagcacctggtatctaggacagagaatgtgctgcgagatgcttgctgactgaccaagatacactttggtgtcaaaactcctttggagaacctcaaatgctggataagtgctggataaatataaggccaatgataataaatattatacttattgaaagatgtgtaataaacctgcattgagtctcaaaaaataaataaataaaatatgctttagataagacattttactagaaatgaataggacttacaaagatggctaaggctttattcctcctatcaggggagttcatgggagcaggagggaacacgggtgggaggaatgaccacatgctagacgtggtcattctctcttggggccagtgtctttcaatgataataatgatgatgatgaacaagatggttacatgctagagacaacgctagacccttactttatatgatcttggatcttgctgagcggtaactggcattgttcccattttagagacaaggagactgagattctgagccataggttctgaattgccgagagccacacagactgcagcacagtagctgcaattcagacccaggacagtgggacaccaaagctcacagccttcccacttccccttgtgccccttcacctccaggctccggggaggggctaagtgcttgggaacctcagtgccctccttccctctgccaggtacctgaattactttgccaccaaagcgagccccacgggtgtgatcctggacctctgggaagctctgcagcaggacgatggggacctcaacagcctggcgagtgccttggaggagatgggcaagagtgagatgctggtggctgtggccaccgacggggactgctgagcctcctgggacagcgggctggcagggactggcaggaggcaggtgcagggaggcctggggcagcctcctgatggggatgtttggcctctgcttcctcccagttcacagccagagttgcctctcctcctcctcttccccaacccccagaccatgaccagccttagaaaatccatgtactctgttgttagagggcccagagttccttctccacccccgctctctctctcttggcctgagatctctgtgcaggaaccaagatggggctgaagcctctggaggcagttggttgggggcgggcaggcaggaggccctccctccacccccccaccctcagcccggcaacttctgggttccatgggttttagttccgttctcgttttcttcctccgttattgatttctcctttctccctaagcccccttctgcttccacgcccttttcctctttgaagagtcaagtacaattcagacaaactgctttctcctgtccaaaagcaaaaaggcaaaggaaagaaagaaagcttcagaccgctagtaaggctcaaagaagaagaaaaacaccaaaaccacaagggaaaagaaaaacccagtttcttaggaaacgcaaacgatttattatccagattatttggataagtcctttttaagaaaaaaaaagaaaatgaaaaacaacacaaaaaaaatagaaaactcttttcttgagtgtggatgagaatgggcacgctcacacttctggccaggagtgaatgtgcctgtgtgtgtgtgtgtgtgtgtgtgtgtgtgtgtacatgtacgcgtgtgcattgaggagagagagactgaacagagagtactttgctgctaacgaatccatcttggactaaattctgacaaggcctcagtttccccagttgtgcagggagtaggtcagacagggttttcactgtctagatttagctggttagattttcctctaaaatcttaagcagatgctgaatccataaagccaaggagtgctgagggctggagtgggtgggccctccctcccacagccccagggagatacatctggactcctgggaatctggattaagaaagttgggatgaaagaggaggactgctcaggccagttgtgagccagggagaatgttccagtctggttttggtctggtggctcctagaaagggatgtggcccagaagtgggactcaaacagagagatgaagtaggggaggggagtcctccacgggcatctctctcctggcggctggatagctttaccctagggtggggccagccctgacaccctcatcccctcctcagcccagcagcctctagagcagcgtggtgctctcttgatggccaggaatccagaatctgcccttccccaaccttggtttctccttctgtaaagcagagtgatggctgagaagtcctctctagctgcagaagcctgagcttcccggtgtcagtcagctctgcaacgtgggagccttggaggcgggtggcctggctgtgcttcatatgcccaggagtggagaaggaggctgagaagctggtttcccagctctgatctccacaggcacctcctataaccctcctctcacccaccccgctacggtctgagagatctgaaataacctttcccagtgggcagggttgccagggttgaggggacagcacataccacccccacccaacctgttcgaggggccctgcatggcacgggatgagtccctgccctgtgcagctgcctggcagtggctgggacaaggatcttgcagccagcacagaggcctcttcaaaggcctctccctcttggcactccaggcaaggcaggtgcccgcttccccaacacctccaggcagtgaccctagggcatgccccagcaggtctccgagcagccactgggacccgtctcagcacatcctggcctttgaaagtctgatatcctgagaggagggcaggttttagggccgcagttccagccagcgtccccagcctggcttccctgccatggactcagtagctcgtggggcttcttaccacccaccagccccgctggggtgcggcctggctgtgggcaaaggaggacttgcctggagatttgagagaagattccttctaccagggctgctgaggggccaggcctgcatcaggggctaggctctggctgggcccggaggctgagactaaggctttcgaccctggtgcctccatgtggatgctgcctcagacaaaggcagtgagccttccctgccaaagtgcccatcccatgggctcggcctcactggtcactgttagcccatgaacacgtgtgggcctcggtcacgtggctttgagggcagtctgaccaggctagaccacacgtgccgtgacagggggtgccattcccctcgcaggctctaatgtgcccacatgtagcctggcagtccaaagaccaagaatcaacttgcaaatctgccattaaactgctgtgcgacttcaggcatatcactgccttctctgggcttcagtgtccttttcatacctagaagtctgcggtctgaggctctttgggttcagacacactgttctaggcttctgtaggggaccttgtgatctgccgtgcccctcctccctgttcttttctgtcctccccaccccaccctcagaagctgcttgctctgcccccaggacaggagcttgacggatgaagtgcagccagccacccaggtgccatttccagtctgacttccagaaatgtgcaccatgtcctagagcacagacccattggctggagcctcctgggagggttcaaaccatcagctctatgagaaatgcccagaaaggctttgccgactccatccgtctgtggaggctgcctgcctccggggtgggatgggtggtttctcctccaattcagacccaagaggtagcccccgagggcatgtacctggtgggaagcagctcaggtacccttgggggttgcagggcccttacgcaggtatttctctctctctcctctctggggtgcgtgtgtgcgtgcgcgtgtgcgtgcctatgcttttctctgtgggcacatcaggatgcccctcggagagcatgtgcacgtgtccccacctgagcgagcgtgtgtgtgtgctcctctgcgtcccaggtttggacgtctagggtttggtgtgcctgtcttctgccctccctgagcccacagggtcagtcaatgtatcttctacgtgcctctccctctgccttctctcacagtgcccccggctccagagctcaggggtaggggttctcctgagggtgcaggggatccttctcatctcctggaccctccagggcactctggtccctattccccagctcctaggcagctgagccgggtcccttaggggaggtgaccaggagctttggtgcagggagctcttggtggggcaaagggctggacccctgccaggtctgtggacatggttatatgcccgggagaggggggtgcagggccccagggatggcccccaatcccacctctgtttattctgtaaactgcaacctataaataacctttagcattcctattgtaacaaaattaatttttatgaaataaattatatttcctagtctaataaaa

SEQ ID NO: 463 - DNA, 46508 bp, Homo sapiens
  source 1..46508: mol_type = genomic DNA; note = NC_000008.11:23528956-23575463 SLC25A37 [organism=Homo sapiens] [GeneID=51312] [chromosome=8]
ctccctgcccacctcctgcagcctcctgcgccccgccgagctggcggatggagctgcgcagcgggagcgtgggcagccaggcggtggcgcggaggatggatggggacagccgagatggcggcggcggcaaggacgccaccgggtcggaggactacgagaacctgccgactagcgcctccgtgtccacccacatgacagcaggagcgatggccgggatcctggagcactcggtcatgtacccggtggactcggtgaaggtgaggcgcggggagacttcggggacgcaacgagcggagaaggagcgcgcgcgcgcatttgcatcccgcgcgccggcagcctcggggcagcgtcccgaaaccgagctctccccaggaccgcggctggccggggtcgccccaggagcagctgcgcgcagcctgggcgccgcgccttccgccgaccccgcgagggtgcccggtcctcgccccgcaccgcccgctgctccagccgcgtgcccggccccggctgctggcggcgctgaggcgggggaggcggagtggcgagcaccgctggcttcggcggcgactgggctcccgggggacgcgatcgctgaagctctgcacagtcttaccacgctggccgttcgggctggctggggccgcccacacgtgcgcggtttccgagggagctccccgcaggggaagccctcaccacgctggagctgagaaacgtgtggccctggcccggccgcgcgccctcgggacttggtgtgtggctgctgctccccgggttatttcgggaacttggggccggcaagtcttctctcgactagtggcagctctttaccggttcgacagcggcccgtgggatcccctttctgagggttcctgcacttcttcccccgactttgggtcgccgagccgccgggaggcaatgacgtttgccttctccttttgcttgcggggaggtgggtgggcttgtgccttacagcccttgctgtggattgtgtgagaggcactcagtttcctttaaaccctgtctgtcacttgccccggtagttttaactgcatttctgtaaagaggcagcgttactaggtgcgttttgcctggtagactgagacctgccctctgtcagcctgcccagaacaccccagggccaggatagagtagtgcaggaagtaatgccagtattgactgttacacgttgcacttttataggcataactcgcctaattcatgcaacagccctgggggttaacagatgaagaaactgaggcgcagagaggcgaaccgattaccttgcccaggctcctacaccacctcctatcctctggctgcagctgcagtgtgctttggaggattcggaggcctctctaggtggcaattattttgcaaggcaggtcccacagaggcacccccagcagctttatcttgttgctgatgctggtcctgcatgagcaggtatgaaggccagaaagtataactcagagggttttcccggctccggggagctcgcttggagccagcagtcagtgtctggacaggcagaagtccagtgaggaaagacatgggcttccaaggtgctgctggacctaagcctgagccatcacccatatgtccctccagtgtcccagtggggagttagaggaatggttctcatctccaggaaagacactggactgataccaggtggcatttgtatgggaaagaatccctcaaatgtaataaaattctccatgattgaagctgttgtctcaactgccctgggcagagtctggggaaagttaggagcagggaggtgttatctgagcaggccctagtcctactggtgtcttgagatgaatgttctattcgggaaccccacagtgagttcactttagagcatcattttagcttatttttaggattagaaataattagttgtgccttctgagcaccctttgacactctcaagaggcgtttctcacacgtttaaattgtgtgatctgtgtttagtttctccctgccccatacatgttgatatgttttggttcagatgtcacctgtatacttagtattactttccatagcagttttcacctgtggacaggttaacatggtgtgaatggtagaaggagccggtctggttttcctagacaagtctgtaaaacaaggcgtgggttagctaatcagtgaagtcttctaggttctgggattataactgacccttaggggcccttccatgctgaagtgtgcagggttggttttgaggctgccactgagtgccaaggtctgccaacatcagcacagttgtctgccaagcatgaggagtcaggggtgcatcctccatcatggaaaggcttgggggagaccacacctgtgttcctcttaagtattttggatgatggcgaagaccgggagtaactgagtcaagaaacccgggttgggcttcaagccctgctctcacttgcttcatgcctcgggcactgttctgtgccttagttttgtcactataaagtggggacagtggacctgctcagtccctctccacatttttaacccatgcctcgtttctctgaacacacaacacccatcgtcctcttttatgttacttgaaatatcaaaagaattattacagctgaaaacaaatctatgtaaatcggatcttgaaagagagaaagctttctccagttttgaaaggcgccatttttaactttgatcttgtaatgacaaataagaatgttgaatcggctggcttttttctatcctaggtaatgtggactgtggagctctgtgctggtcactttcaaccctgaacctgatgctacttattttgcagttctaagtgcaaagtcggcctggtggatgcttcccattataatattaaatttgcttcttcgtgaggtcacacctcacatccccagtgtcactttaataactagtgttttttacatggtgggccatgacccattagtggactctgcatttaaaaataaataaataaataaaagaagttattagtgagagtgtaaaaatacgggtgtgcctggcatgcagtgggagaaatgttgaaattctgtttgggttgtgtgtgtgtctctgagtgcattttacagacgtgtacaatgtacttctggctgggagttgtggtcaaacaaatatgaaaaccactgaacctgagaaaatatctctggagccccagcaggcaacactgagattatgaaatgggtatttggaagacctttggcaactttcctgctgcttcctgtgtcttcttctttcccttggtcctcccatggtgggatgtgagcactcattcatccataaagggccagtctactgggacctttggctgcccctgcgatgacagtgagcagcaaagtgatacccagggagggagtatagggtctctgcagggctctcaccaaatggtggcaatgacttactcctgtctaggcggggtctggtggcaggttttccatgagcctctttctggtgttccagagtggcaaggggcacttggggtggatacaagaacccctggtctgatcaggagagctcaagacttgaggagcatgccaggtgggtggaggaggaaattccaaccagattaggcacaccactcggagaccatgccgagtcccgcctggggaaagcaggggcagaaggaaacaggaaagatttgaagccgggggacttccgctgaccctttcacaacccttcttttgctttgctgttgggggaaaccctgcctgtgactctcctaggatgagccctccttcccaggttggtgcaccacggagcgttccctctaggagcctcctggctgaccttatggtgtgcacagccagcctgcccagctcagcagagcattacctcaacttctgacttctcctcttctgagttttctcctggctgcaggcagactggtaggaagggtgctggggggcagtgcaggcagctgccagagtcccctcccacccacttcattgctttccaaacaaagtgcagttcggtccatgccattcagcttcagaagggcgtgaaatcccaaattgctctagttcctgggacaaaactataatgatttttctctctcccttcttgtctcctctccctcacatccccctgctcccttcttttctctcctttgatgagaggtgattttcttaaaaggcgaatttggaacgaggaatcaaaaaaggggtatttgtgagctgcagtcctgttccttgtttcatgaacccccaggcagccatggcctgtacccctcaggcctaccctgaggagtgtgagaacctcatccacttttctctgccctaaattggggaggggcaggctggagcgtggtttggaggcgcgtgcccaagagtactgtgaacagcaaagggggcctcagctttttagtagggagaggtatttggggttgaatgggaggatttaatcagctgctttgcttaaactatacaggggtgtgcacctggggtgggggatgtgcgtgtcacctggaagggaggaatgtgcttcccaaaccttttcctggcttccacttgggcacgtttcagctgcatgtggccatctcattagagatgagttttgtcctgtcttgcagcagtgaccagtcttggggaatcagttccactttctctgttttttagtcttgggcttctgactctctctgacttcaggggtttccttcttctgactcatcggatgaactcacctgctggtgtggaagccttcagcatctttcttgaaccccagagctttttggctcttttcctgtctccactagtacggaaccttttcttgtcaaagaatttgtgtttttgtttttgtttttaatccgaaataccggctgtcatgtcccatccatgctggccacagacatacccctgtgatcatggtgttggctggaccatgccaggatgcatggctttgccactcccatgcccaccttgaatgttgtgtctgatgtttgtcataggaggggtatatccaatctctttctcttttttttctccctctctctctctttttttttgtttttttgagacagggtctcggtctgtcacccaggttggagagtagtggtgtgattgcagctcactgcagccttgacctcccagggcttgagtgatcctcccagctcagactcctgagtagctgggactacaggcacatgccaccatgcctggctaatttttttgtatttttttgtagagatgggggcctcaatttgttgcccagactggtcttgaactcctgggctcaagcgatcctcccaccttggccttccaaagtgctgggattacaggcatgaaccaccatgcccagcctctttctttttgttgaactggaaaccttccctaaagttccctcaaccttccctcaagttcctactgagatggatttcccacccttagagaactatcttggggttcaaattccagtctttgacttactggttgggcaggacacttagcttcttcatgtccttacttgtcaaatggggatcctgattttcttcctgctttctctttcctgacccagctttccattgcttctttcccacttctctcatttttccagtgggccttgtggaagttccttgttaacaagctcccttacatcttcccctctttaccgaatgtttctttcacttccccctcctgatggaaatccagctcctcttgctaagggttgggagcatggacccttgagtccaaatccctggaccgggtcccatttcccagttaggtgtgaccttgggcaagtttcttaacctttctgtgctatttccctatctgtaaaaagaagaagagatggtaccgatctcccagggtggttgtgaggagggttaagccctcgctgcacttcacatgcctggtacacgcacagaacagttgatactctctgatgtctgctctcatctttatcttcatcatcatcagcatgattgccatcactttctctcattccctgaggactctggcatctgatgcacagacttcacctccacagatcccgtcctcaccctgaggatggcccctcttcgtccccacccgactcaagtccaaatcactccattccttacacctctgagtcaatggccttcacctccatggtcccttgacctaactcagaatcttcctgagatcttaaatccagattattatagcctggaccccaagattgactgctgcagctgctggggcctttagtttctctgcctttggttcttccaaccctggcttgccccacctgggtcctggacagcccatctgtcccttgggcagcgaagcccttcaggggacattcacactgcctccaatgcgcatgctccctggcctcagctccacatgtctgggcagctgcttgcatccttcacgagggtcctgttgccccttagctccccaccctattgttgtcagcctcagcctggcatcttgcttccatgtcatagggaaaccaggacctcaatcaaacccatcttcctgtcactgtccttccaaactctcttgccttctacccccactataagggaacaggtgtcttcattcctttaaggtatatcaatgtggcagagaagggagatgtatacaaaccaccttgacaccaggatttgaatactggctgcacacctgggcacattacctaacctctctaagctcaggttccttctctgcaaagtggggatatgaatactgtattagtctgttttcaagctgctgataaagacatacctgagactgcgtaatttatacagaaagaggtttaatggacccacagttccacgtggctgggaaggcctcacaatcatggcagaaggcaaaaggcacatcttacatggtaacagacaagaaagaggacagaacccagtgaaaggggttttccccatataaaatcatcagatctcgtgagacttattcactaccatgagaacagtgtgggggaaactgcccccatgattcaattacctcccactgggtccctcccataacacgtgggaattatgggagccactattcaagatgagatttgagtggggacgcagccaaaccatatcaaataccaagagctattttatagggttgttgtaagaattaaatgaggcaacatatgtaaagttcttgccacagtgcgtggtgcgtacgttgtcaataaatggtgatggtgatgtcatttttgtcccctcactcttgagtgactcggttccaggatctttaggcttcctgctccattgagtttttctcaaaagtgtttctacagatccaagcccatcctgtcttaaataaaccccagacttctcaccttgacctcacatgcacccccaatgtttcttcccataaacaaactgttgcccctttttttcctccttaaaacaacacatgttctgaaagaactattgacactggtctctacttcctcactgccacccctgcttcctggcttttgcactgcccagccgcagcctcacagagacttctggctacccatcatcttcctggcccaccctgctgcctctgttcctgccaggggcacctccgagagggggttggccctgcgatcctcagttttcctctttgggcatggcttctcctcaggaatgtgcccttccacctcattttccccagcacacatgcctcagtttcctcctgggacctgatggctcccagatcactatcttgggcccagactttctggagctgaatctccagttgcctcggagcctcctcagactcagtgtggccagaatggtggtcctggcttcccctcgggcctgcccttctgcctccttctgcaccctgggatggtcatcagcttttctcccactgctgccctgtatgcagggaaggcctgcctgtggctgtatctgtagtacttcttgaatgtgtttccttctctccctccccacagctacttactgccttggttcagggacctggatgtctcctcttccttgagatcccagactgcccaagttaaaagtgagtttaggccgagctcagtggctcacgcctgtaatcccaataccttgagaggccgaggtgggaggatcacttgaggccaggagttggagaccagcctgggcaacatagcgagaccccataggtacaaaaaataaaaacattagcttggtatagtggtatgcgccagtggtctcagcttcttgggaggctgaggtgggggaattgcttgagcctgggaggtcgaggctgtagtgagctatgattggaccaccgcactccagcctgggcaacagagcaagaccctgtctcaaaaaaaaaaaaaaaaaaatgagattactctcccctgcctcacatttccctattgcccattgctgctttgtttttctccccagcagttgttacttcgtaacacacaccatcgtttatttatattgtttacatattttacttatatttatagtattatttgtattgtttatggtctctcttccctcatcagaatgtaggccccaagtgggcagggatgtatgctcttctgttcaccactgtattcccattgccagaaacacagtaggtgctcagtaagtatttgatggaggagcttctgcagttcattctgcacgtcagccatggctggtcctgctcttcagcctccaagcccagcagcttcctggtgggctgcagttttctcatcggaaatagagaagagtagcagtgccgattctgcctcccttgcaggtcgttttagtgcatctagttggaaaatacaggcaggtttgcagggaacacagttttcaaagtgtaaagctcagtgcaggtgctaggtcatggtgttttttgtcacactgggatcctgcgggagaggtaagtttagctgattggagtggaagatccagcccattcttcgtggtgcctgccgcagagcctgcaagcctgcagaaagacagggagtagccacgtctttctgtagttcacacctgtgtgtctccccacctgataatccctcagcacttctgtttgccttgcatgtaaagcccgacctttgcatggcaggcacacagactgaaactctttcctcctccagcctttcttggactcatccacagaatgacaaagaagtattctgtgaatattggttgaatgaaggaaggcacggctttttaaaaaagatgaaaaaaaaaaaagttatgaaaagctttaaaacttgctattggctgggcgtggtggctcacacctataatcccagcactttgggaggccgaggcgggcagatcacctgaggtcaggagtttgagaccagcctggccaacatggcaaaaccccgtctctactaaaaatacaaaaattagctgggcgtggtggtgggtgcctgtaatcccagctacttgggaggctgaggaaggagaatcacttgaacctgggaggcggaggttgcagtgagccgagatcgcgccattgcactccagcccggacaacagagcgagacttcatctcaaaaaaaaaaaaaaaaaaaaaaaaaaccagaaaaaaaaacttgccattaaacaaattccagttttgatttttgttttgcattggttttgaatccatgcatgttatggccacaaagaagactttcttggctccgttgtttgtcgtgtgtgtgtgtgtgtgtgtgtgtttgtgtgtgtgtgtagaacccagcaagcagcagctataccccgatgaggcaatgtcttcatttggccactcatgtcattccacgtttcctgagtgccctcttggctaggcactgtgctagacactgggctacaaaaataagaatgcctggtccccgttctcaaagtaagcgtgcttcctataattagaccctgagctaaggcgacagaaccagctccctttcaagacaagagtcgcctgtcttgacggactttcagatgggctggaagaacaaggtctggcgtgtatggactctgaactgctcaagctgctgccgtcttgcaggtctagagcctacagggtagcgtcattctagtttctttgctgggcactctggaatttgttctttctcctgcgagagacagtggtcctcagttgtgttccctccccaccatcctcaccctccctcccacggtggttagtcattctggaggctcaagttggctcacagaaggtgctcttgaaaacatcccccaccctcctcgtaaccccagacagtcaggaagggccgttgtcgggtactaagaggtgttatggtttcacattcatgctttctctctgaagagaaaacaaaacatgttgaaatagggagaaatcccagcagcagcttgcttgaagcaagggttgcataacaggtctaggaaacgtctggccgtgtgggtcaagttgagggactgcagccttgtgtcactgagggaacttcttccgggtccaccgagcctctggatccattagatccatccagagagccacttggaaggctctgggaccttgagttctggctggccacgtggtctgtgatggctgtcactggtgaaagagagaccctggctgatatttagccaacagtgtttattccctggcatgaccagaaagggtgcatttgagacactgctgtgggtgggggacccggaggagtgtttgtgtgtcagacttatgctggtgttgaggccctagaaaggtcaccaaactggggcggggtgtgggccccgtgaatttaagtcctggtcctgccattaaccagcttggaaaccttgggctaatcatttctctgggctagttttctccttgtgaatctagactagtgtcatctactttacctttttgacagggctgttgggaagcttaggtgagatagatttgtgaatggctcttgcaaaccttaacatgcaaagctaatgacagattgtatcagaggcaatgtgcttgattattagagctgtttaggttaacagcacaacctctgcagccagactgcctggagtggcacctggtcaagttcctgaaacctctctttgccttatttttctcatctataaaatggggctaataactttacccatttcagtgttgctgtgagaattaattgagatgatacacctagaatgttaaggcacatggcaaatgccccattaatatcagctcctcttgttatttctaaaagtattacttcaatgcctgggtatgtttatatattgctggtgcaattgttaattttatattatttttgtattgttagcttttatttggtcatttgatcctcttagctctcctttgaaggtgagaaaaggcaggtgttgtttctcatttcatatttgagaaaactgaacttcagaaaaattacatgccctagaactcgggcctttttctgctccagagctgaaagcgagagaagagaggaagggaattaggctggagcaagccagtaggatgttggatgcagactcagatgttaatggcagcagagcccttgagctggattctagaatatgagaaagggctgagattgatgatggggcccagctgcattgttgggatggaggaaccagagttgagtcgagggagtaactccaggaaatcatggcacccagaaagtgtggcacagaatgcagggctctaacgtatagttaggagttctttgggcaagtactccagcaagcaaggaagaaggatgatgacatatggttattgccacaggatatttttggctgcgtctggcttctctctctgaaacaaattgcagttgctgtgacaccttctcatttcagcagtgagtcgaagttgcactcaatatagtgttttgaattcggactagtcgtgaagattcctttccagatcatagtatatgtatataagtcacttactgggaagagcactacatcatagttccgtggtccactaaggctgcagttttcttatctgaaataaggaggggtaacggtgcccatcctgcctcccctggcaggtccgcttacgcatgtagtgagaaaatacaggcaggcttgcagggaacaccgctttaaaagtataaagctctctgtgcaggtgctaggtcatggtatttattatcacactgggatcctgtgggaggggtaaggttagctcattggaatggaaaatccaggctctcattccagcactaggactcagtgcagctgcctggccttgggcacttaacctctctccttacagtgtctcccatctgttgagccaagacagggtggctgtctgctgccgcccatttggctggctaatgaggaagagccagtgctgctcacagcatgctcatttcgtggtaatgtagacaggggatagtagtggctgcgtgtagcagaaaccagcagggtaggaccggatgagcccaccttcagggaggtgtacccagggctgttagtttgaggacgtctgtgggattttatatccttactcttattttccaagaaagtctgtccctttgagcaccaggcagatgagtctggggacgctgtgaggaggggtcccccaggagcaggaaggtgactaatgatcccggaagaatgactgtgtgtgtttgcagacgcctgggctcttccccagtttggcctttcccgtcactgttttcctcacttgcttaagaggagaaggaggtaacgcacacaagtgcctttgtctcagggtccccacggtgcccatcttgagggttttgcgggcgccttgcattgcctaaggcctggctttagaagcagaacatggagagagaggtttgcagcctgcaggaagctggccagccagacctgccgggcagcgggacccgcgggcagtgcctctgactcacggcacgtccttgatacgcagtgctcccctccccactttctctgccctcctgtggatcacgggtgtcctagggctgttgggagcctggattaaagttgctgagtggccggctgatgatcagatccagggagtcagaccagaggtggggacatcttttcaaaggcaagaagatgctgccagtgcgtgtatatacatatgagggtggaaggggtaaacccagggtgtgtctttaactgaagaatcaagaaagctgctttccttagtcacccgcctctgtggttcgtttgctaaacgttggcttgcgttagcctgattcacagtaatgtggctcccaaggaagattcacatggtatttgtgaaaatgtagcttcatcccctgcccttcattgaatgactgaattacagtcagcaccacataacgatgtttcggtcaactatggactccatatgtgatgagacagtgatcccatagattatagtggagctgaaaaattcctattacctaggggcatcacaacgcattgcatttcgcccgtgtttgggatgatgctggtgtaaacctactatgctgccagtcatgtaaaagtatagcacacacaattagtaggtaatgcttgcaaataataatgaaagactctgctactggtttatgtatttactatgctatactttttgtcattactttagagtgtactcctacttttttttttttttttttgagatggagtttcactcttgtcctgtaggctggagcgaagtggcgcgatctcggcttactgcaacctccacctcctgggttcaagcgattctcctgcctcagcttcccagagtagctgagattacaggcatgcaccgccacgcacggctaattttgtatttttggtagagacagggtttcaccatgttggccaggctggtcaccaactcctgacctcaggtgacccgccctcctcagcctcccagagtgttgggattacaggtgtgagccaccgcccctggccttttttttttttttttttttaagttaattgtaaaagagcctcaggcaggtccttcaggagggattccagaagaaggcattgcgatcacaggaggtgccagctgcattgggacaagatgtggaggtggaagacagtgatattgatgatcctgaccctctgtaagcctaggctaatgtgtatgtttaagaaaaaagtttaaaaagtaaaaaaataaaaaatgttaaaaggaaaagcttatagaataaggatatagagaaaaaatattttttgtagagctgtacaatgtgttttgtgttttaagccaagtgttattacaagagtcaaaaagtcaaaaaattgaaatttataaaacaaaaacattacagtaagctaaatgtaactaattaattttatttatttttttttttagagacagggtcttgccttgtcgcctaggctggagtgcagtgttgagatcatagtttactgcagcctcgaactcctgggtacaaggaatcctccctcctcagcctcctgagtagctgggattacaggtgcgcaccaccacacagctaatttttaaattggtgtagtgaaggagtttcgcaatgttggccaggtggtctcaagctcttggcctcaagcagtcctcctgcctcgacctcccaaagtgctaggattacaggtatgagtcaccacgcccaaccttgaaatttaatttattatggaagaaagcaaaagtttaaaaaataaatttagtgtagcctaagtgtacagtgtttttaaagtctacggtagtgcacaggaatgtcccaggccttcacatttactcaccaccactcacttaaactcacccagagcaacttccagttctgcaggctccattcatggtaaatgccctacacaggtgtaccattaaaaaaaatcttttggctggttgtgatggctcatgcctgtaatcccatctcctggcttcatgccattctccttccccagcttcccgagttgctgggactacaggcgcctgccaccacgcccagctaaattttgtatttttagtagagatggggtttcgctgtgttagccagtatggtctcgatctcctgaccttgttttgatctgcttgcctcggcctcccaagatgctgggattacaggcgtgagccactgcgcccagcaaaaaacgatgtggtattttcactgtactttttttttgttattgagacggagtttcacttttgttgcccaggctggaatgcagtggcagaatctcggctcaccgcaacctctgcctaccgggttcaagcaattctcctgcctcagcctcccgagtagatgggattacaggtgtgtgccaccacgcccggctaattttgtatttttagtagcgatggggtttcaccatgttggccaggctggtctcgaactcccaacctcaagtgatccacctgccctagcctcccaaagtgctgggattacagttgtgagtcaccgcgcccagccttcactgtacttttggtatatttagattcatttagataacaaataccatggtattccagttgcctgcagtattcagtacagtagcatgctgtacaggtttgtagcctaggagcaacacactatagcgtacagcctaggtgtgcggtagctatcccctctcaatttgtgtaagtacactctgtgatgttcacagaaggatgaagtcacctaacaatgcatatctcagaacatatccccgtcatttgcgatgcgtgactgtaattaaggaatggggcctatggggtatgactgtgggtgctgggcactaaggagacggaggcttgacacaacccaggcattccccatgggagcccctctgtggcaggaaggacagatctccaatgaatcattcctttcaggagtgatgagctcagtcttcagggatcctgcacctcacggggaggagttgggaaaggccccccgaggaaggaatatctcagtatctctatctagacctgaaggagatgtggatgttacaactaaactgtatgattctctgtgtccctgagaacatcacagcctatttccaaggtgcctggccatccccagggtgcctgcatgccactgacactctaatctggggttctgctctgagctgagaaagtgtctgtggtttggggtcatcaggtggcagctcttctcctctctgttctgaaatcttaattccctgtttgactgcctggtggctttcagagaagcccagcctcctcccaggtgggaactttcactgtcgaactaaggacccgaggagggtggaaacaggaggaagggaggctaagcggtcacatcagaggcatttctgctcatcgttggctcataataggtggcagtaggggctggtggagcagtggccaggtaagttgctaaaaataaaacatgctcatgtgacgtgtgcaggtttagggtttgcctgagtgagctttcctggtccaggtcacaacttgtagggcaaagagagacttgaggatggtgtaggcgacaactgtgccttccaaaggtcagagatggacctgggatcttgtagtaccagggcctgctctggaggctcagattcgtgtgtcacttcttgtctcttttgaaaggtaactggagagctggacactttcctgtcctctctctttccttgtagccttcctctctcagagatggcctgctatcaaatgccaggggcacagtcagctgggcttggtaaagggcctgagatgagagcttggggactttcccactggagtccatgatagtccagggtgtagacagaagctcttggatctcacagctttggaaaccgagtcctgtttctccaacaggccagtgcggtgacgggcacagacctgctgtcctctctatttgtgtgtccactgattccctggcacagggggtctttgttacaaaatctctttgctgggtgctttgaaggagcacgtgtgtgggcctttttcagggtggttagacaatgccaagctgtcactcagaagaaatggtcaggatagaagcatagaaaatgccctgtggaaatgtagatgagtgttctggctcacacctgtaatcccagctactcaggaggctgaggcagggggattgctggcggacagcagttcgagaccagccttggcaacggagcaagaccctaactctaaaaataaaaataaaaaaataggccgggcgcggtggctcatgcctgtaattccagcactttgtgaggccaagacgggtggatcacgaggtcagaagtttgagaccagcctggccaacatggtgaaaccccgtctcaactaaaaatacaaaaattagctgggtgtggtagcagatgcctataatctcagctacttgagaggctgaggcgggagaatcacttgaacccgggaggcagaggttgcattgagctgagatcatgccattgcactccaggccgggcaacaagagcaagactctgtctcaagaaaaaaaaaaaaattggttttgtgtggtggtgcacacctgtagtcccagctactcaggaggctgaggtgggaagattgcttgagcccaggagtttgaggttgcagtgagccgtgatcatgctactgcactctagcctgggtgacagagcaagatcctgtctctaaaaatattaaaatgaataaataaaagaacagaaaatgacctgtgtggggagaagggttatctgtgaaaggagttagaaacctcaagtgtacataagtaagactggagatctctctgttaatgaaattgtgcttaaaaatttttttttcttgaaccttggcttctcaggcaataactgaattttaaggtgtgtgtgtatatatatatataggtatatatatatataggtgtatatatatatatatatatatagtgtatatatatatatatatatatatatagtgtatatatatatagtgtatgtgtgtgtgtgtgtgtgtatatatatatatatttgggccaggaagggtgaagtgttaaattgccttacttagaaaattaaggtagatttgtatttagcccttagagcttcaaaaatatcagctcagaaatgacttttaattgtgcaggtgataaaatcacaagaaaaaaattcatctacaagttggaatgactcttagctacttatttgtttttaaatttttttttcaaattttggaaggaagtagagaaggagttagaactgtaatttgctattatgggggttggggtgcagtgcgtattagtacaatgttaggtggtggcaggttccgtttatccttggaattagcactgctccccccacaggcttctgggagttgggagcaggctggttggtgacgctttgcctggccttggataagaactcttgttttcaaattcccttgaggtctcttccaagaatcttttgcattttttctgataaatcaatcataaggaagtttctgaaattctctttcagaccctacaacccacaagttactgcaaagctgggcttctaccagaagtgagtgatttgaaattgaaaacagatttcggatctcacctgagtagctcgagtgtaagggagggactgggagagccacagagaacatttgtcaatccagaaccaaccattcatggtgttgcttgactggagggcagggaaggaaaggactagaagcaaggcgaaagcagatctttctgtagatacacacatataagtcttggatttgcattttagggtgaattgtaattagcttgagatgaccaggggcccaccaatcaagcaactctgggaaaaacacttgtctacatcttaagtttctttgtctataaaatgtcaagattgaactaacactacatgattctctcgggaactcaccagttctaaaatttccactccttcttttcacagggcagtgtaactttaactccctgtttcaactttgggtgtaaaatacaggctcacaagcacttttgctttgcagcggaagctaggaagaccctgctgtggaattttgcagaggggctgagcagtggtgggaaggaccagcggcccatgtaccatgttgggcccctgcattccaaggtgtctgcctagaaataaatgatagtttatttaacatacttgtaacttccaacgacaacacttcaagactgcaaatcatccatccgggcaattacagaaatgctgaacggccacagccccgccctggaatcaagggaagaagtgtggcagatgcttctggaaggctctgtttacagctctctgactccttcctgccagaacctttcacaagttcactaccaggaagctgagtcatccaggggtcagccggcatggccaaggtcaccccgcactgccagcagcacagatggggttagcccatcattccagaggagcatccgtgggaatgatggggttggggagctggggagcctccctgcagcatctccctgccatggtgttttgcatttcctgtagatttcgcagtgagaaacggtctcctcttatattcacttcatttcttctctctttctttctttcttttttttgagatggagtctgtctctgtcaccaggctggactgcagtggcgcgatctcggttcactgcaacctctgcctcccgggttcaagcgattctcctgcttcagcctcctgagtagctgggactacaggcatgtgccaccacgcccagctaattttttgtattctcagtagagatgggatttcaccatgttggtcaggatggtctcaatctcctgaccttgtgatccacccgccttggcctcccaaagtgctgggattacaggcgtgagccaccacgtccgggctttttttttttttttttttagacttgttgcccccccaggatggagtgcagtggcgcaatgtcggctcactgtaacctccacctcctgggttcaagcgatgctactgcctcagcctcccaagtagctgggattacaggcatacaccaccacacccggctgattttatagttttagtagacactgggtttctccatgttggtcaggctggtctcaaattcccgacctcaggtgatctgctcacctcagcctcctaaagtgctgggattacaggcatgagtcactgcgcctggccaaaggcaagagatgaggaccatatagatggaaacacagcattaagggtaaaacactctctctctgctctgtctggtgttcagggcccagcatgggctgtatgtcctacacttcgtttcaggctcatcttcaggtgacaccagccttctcggagcctctgtccacatcccacctgtcactacctctgccctaacttcaccttcagtggtcactgccaggacccctccccaaatctaaatgaggtccccctgcatttgccctcattgcaccttctacttttgcttcatggcatttagagtttggaattttttatcgataggatttttagtactctctctctcctctactagactataaactccttgaaggcaaagacgacacctgctccctcagttccagcagcccctaacactgcgctgacatttaggtagtagcagcgttttcttgcagaacgatcctgtagttttaccagctgagacttctgtggtctggggagtcactcatctctggtccctgcctcctcctctcacttttggaaacccttctggccagacggctttggtttaaattgtatgccggagctcttggttccagggagagggttttagcgtaaaaatctcactcatgatggaaggttcctgctattaccttttgcatccaatacaacttaaattgactcctccaaaagcttcggaagtaatttgtacctattgtctagcataaattcagcaagtgggtcccggaggctgaaagtcgagtcttgcggttgtttcctctggtgtttctccctgagacccttagaacggcaagcctggtgcatctggtgtcctgtcatctttctctgtgattgtcatcagtgtgaaaggtgaaaggtgtgtggagaaagaacatcccttcgagctgtggcttagagctgtgacttggcaccacgtggttagtcactatcaagttagaagcctttgtgggaaatctggctttggtaggatctgggaaatttggacccctcatttgccccctggcatctctaaattccagagcccagctttgatggggcttacatccccagctgttaacctgtggggtgggccccagactgtggccaggtgcattgcgctaggggagacagatccacagcaggcagaatttgaggaggacttaaaatacctgctttgggaggccaaggcgggcagatcccctgaggtcgggagtttgagaccagcctgaccaacatggagaaaccctgtctctactaaaaatacaaaattagttgggtgcggtggcacatgcctgtaatcccagctacttgggaggctgaggcaggagaatcgcttgaacccgggaggcggaggttgtggtgagccgagatcaagccactgcactccagcctgggcaacaagagcgaaattccgtttcaaaaaaaaaaaaaaaaaaaacacaaaaaaacaaaaacccgctttgttacctgcctgtgggtggaattgagttcatctctgaatccgtggtagtcatttattgagcacgtgttttagtgagcatggcatggcgctggctccgagatcacagtgctgccgccctccttcacgtttctctgacctttcatgggagtcacatgcagacgcatcacttggtataattatacgtggaggaatgagcaagaggaggctggcgacgggactgctttaaaaatcccttcttctgtggataataggctaatagcggggtgtgctttagaaggtgtggcctccgccaagggcgtgggaactgcatttgtagaagctgggaggaccacacctggcttgggagacggcatgggtttctgaggtgcctggctccctggcctgtccagtgtggacagcttacgcgcagctaggtgaaatgattgtgcagttgctgagggattgggtggcagagctggacagaatttaggtcttctaacttggaacagggctgtgtccatcttacctaggtgtacagtttggggagcactgctgtttggtctagtgagacacacttggtgtaaatatctgtgccctgtagtacccagattccaagggaccagagagcatgcccgcacccacgggctggcgggagcccaggtcctccagggctgctgtggagcatgggcttcttggtgcccagtcctatagctgaacttgggcggcctctggctgttgcccccagggctggtctccctatagttcagaggcgagccagctctcagcagcagggagggccttttccatagtatgaacttggccacaccagaccagtcagcagtgtcgggaatcttggccctcaaggtccctgcctagccctggcctggacttcagcactggtcaaaggtccccagagctgcccttggctctgagcaggtgagtgaacttcccagagcacttttgtctgggcctctgtgccagtgtaaactgataatagtgatttccctgccccacctctctgccagctatctaagttttctttgttacataatcaggattaatttaagcagcctaggccatccatttagaaatggttagtgaagaaaggtgaatggggaggggtcagagtcccttagggggccaccaggtgcgagtccccttgctctttggggccttggtttcccttctgtgagttggggcagctgaagggaagggctgctcaggtggtcctgccacatcccagtgttgtgtctagtgagtacaggtgagagtgctcccaaccagggcagatcctgctgctaggcagtgagtcaggaaggaattggtaaaaatgacgtcattgctaagaatgacgtcttttttgctgtttatccaaaggaaaaaaaaaaaagcagaaataaaagcagcaggcagctgtccaccagaccccatgcaaagggcttttccttgaatcctcacagagactttaggcagtaggtgccattaggagccccacttacagataagaaaacgggggcagagaactgaagtgagtcgcccaaggacacacattgaggaggaagcaacagagctaggatttagatacagaggggtctccaagcctgtccttccagctttgaggtcctgggcctatatattccatcagaaactgaaaggtgtgttggggggtacctagggtcaggatggggttttatttctgtcccttccttgtgatgctgcagggactgtgacctggagttcccaacaccagtgccctgtggctggtagcctcctcctgggactccaggatctattgtttgatttagccattttcttctgtagtccgatgggagggattcaattcaaacctgcaatactgttctttgggccatacaggccatttatcagcaagtagagaaaaacacccacaccttctagcaagattaagctagttctgtggttcttaatgataatttaagccattttgattaacctaggtggtggttttctccctaccaggtagggaatatactggagcctttctaaaaatagttccggtgaagataaacatttattgagtacctactgtactccactaggtgaatacaaggatttctcgttcatctcaggaagcatggttaggggattttacagacgagggaactgaagttcagggaagttaagttacttatccaagttcatatagctgaaaaatagaataggatttcgaccttgtggtaggtggaaaccggggttgtctttgtgctctcaggcatgtggctggcgtggggtagaagctctctatataatggttgagtgactggatgagcttcaaagctggtccctctggcttttcctgctaccccaggccacgtgcccagaaggaacgctgtcttacctgggaggtctttattgactgtttgacgcccttcccatcctatcccaaccccttccccatggcacctagtttccccaaccagaacgtacgttacttatgggcagagacggtctttgagcattgggtgggtggttgaacgcagtttctttgagattctgtgattgggattttcagcaaaatatggtagcaagttggtcagaggggcgagtctggcagtgggggagcccgggcaagtctaactgtttgctcactggcagaacaaagttggggaggttggaggggtaggggaactgaaagcaaaagaaagctcacagggagccccatcgtgcaaaaccgatgatggcagagctgccgggctgcagcgtggagcggggcgggagccttgtgtggagtctgtgaacatactctaggtgcctggatactcctcttatctccccacacatgggttgatgtgcatgtacggtgctttgatgtggactcttgtgttaaatttgttcttctgcgcagctttgtgacgcttcagtgagtgtgtctatatacaaaaggaaaacagttttggctgggtgcagtggctcacgcctgtaatcccagcactttgggaggccgaggtgggtggatcacctgaggtcaggagtttgagaccagcctggacaacatggtgaaacccagtctctaccaaaaaacacaaaaattagccatgtgtggtagcatgcgcctgtaatcccagctactcaggaggctgaggcaggagatggcttgaacccgggggctggaagttgcagtgagccaagttcacgccattgcactccagtctgggcaacagagtgagactccgtctcaaaaaagaaaaaaacaaaaaacaaaaaaaaaaccaacaattttgaggatgaggcatttcttccttacttatgagtgggatgtttatgggccggtgacattgacaaggctggcagagtcaaggggaggccctgggtagtctagcttactagcagtgaattcagttctctcttgaaagcaccgtgactgttggaatatttcagccttagcctttgaatactgacggagtgccaggctttcgtctgtcaagatgcccctctgtgacctcagctggttaatgtctcaagcgcttctttaggagacagaatgggttggtattgaaccaaccactattgcccagtcttgtgatgaccagggttgtggaacagataagttgtgtgacctccacgggtcagggctgttgactttgcctgtaagttacactcttgcagctgggcatagacacagtcctcaggggttttgtggacattaacaagtaaggatttaggtgactctgacatagggtcttccccaaggtcaggcacagaggaggtggcatccatgggacttagcatgttgtagaaacagagcatattgggacaaaagggaagttgaagatcacctgggatcctttagcgtccatccctttgtgagagataggatagcctagttgttaacagcatgactctggccgaccgcctggcttctttctagtcttccttctgtactttgtgaccttgaggcaagtcatttggtctctgtgcctcagtttcccaatttgtggaatggggataactggttgctaatattgctgtttttattgttataattattttgtaaatagaagggttgaaggttcagggaagcaagttgattgacctgaggccatacaatgtatcagtgccagatgcaggatgagaaagaactgtgactcaggccctgtccctcttaccagggcagggcaggacagggaagctgggcaggagagactggcagctcagttccctctccagtccagggtagtcccttccctttctgtctcgcagtgaggtcaccagttgcactcatgaaatcttagtcctgttatctggcatctttggaatttgccccacctgtagggcagagataacttaatcctttttggtgggccacatatgggatattctgggtgtgttctgggtacactgggcatgggccaggcacagacccttccatccattggaggcttttctagagaaggggtggagaccagattgggttcctagggtcgggggatgtgggaatggcaccctctgaactacaggcaaggctgggagctgctgccagtgggcggagagggaaatctaactggtatgtgatgttagtggtggcctggcaagcagctgtagctttggagagagcgaccagcctgtccaggggcctggtagggaaggcttctgttgcacggcctgttgctttctctcagatactggagagcccatctgtcttgcttactgcatggcttttcatagctcccatcatattgctgttgggtgcgattcatagccatggaagacacctgatcataaagtaaattccacacactccagcaaggtattcagggccttgcatggtctagccccaccctacctttcttccagcaaacaataattgatcatctaaggtggcagcttctctcctaagtctgaggctgcttctctaccctcacctgactgctgtcttctctgcacaccagaccttccggccacaggtcctcattccccagatgcaccagcatgttcacatcctcctgcagcgggaattgttttcttcctctccatgccaaatttgtctttttctttcccagtcaaagtaacatatgtacatagtcacaaaatgaaatagtgtagaagagattgtagtgacagctctaattcttacagcttgacatactcttcctttttctaggtggctgttcaaatggcttccttccagccaccttctccaggttggatgtgatctggactctggatctctaccctatagcacatcctgctgtgacctattccaaggagaaggggggtttggtgctggggcttctctcctaggaggctgaggaacttggttattgctatcttagcagaattgttattttctaccaaatgtgcaatgaaaactcttcactgagtcttttgcccctagcaatagcagtgcttcctgaagccccagtagaccctgaaggtttcaggactgtgtctggagagcatcagtgacaggtggcaggaatcctctgtggtccacttcagaggcggcagatgaccaggaggtcagactgtggctggtcttttcagaaggacaaacgtgacccttctgaaaactgggaccattcggggacattggtggaaagacagaggagcctttatggtttgttctcacacatatgaatccactttctcccccctccaacatcagggtgacctgaacgctgaaggaagtctaggccttcctgtaggtgaggcagggaaagccacgtagacctgatttagttgaagtgttttccaccaggtctcaactcttcattttgtcttggtatagcttttctggctgactttctagcaagctggttgggctctttgcttgttccaaaatggtagttttcaccagagacttttcagatgagcaggaagcttttttcagaatgtatgttcttctaactctgcttgagtcccccgccatgtattctgataggcatttgttttcccaccccatcccccacttttttgaagtgggggcaatgactacttttaggggaatcatttttctgttgctggtttcaaaacattaagagcaccaattttttttttttttttgcaacagagtctttctcaggctgaagtgcggtgacatgatcatagctcactgcagcctcagtctcctgggctcaagtgatcctctcaccttagcctcccaagtagctaagaccactggcacccaccatgcctggctaatttttttaaaaaattactttctgaagagatggggtcttgctatgttgtccagactgggcttgaattcctggcagcaagtgatccacctgccttggccttccaaagtgctgggattacaggtgtgagccactgcacccagctcaaattttccttttcattaaaaacatacatatatgtatatgtatgtatatacatatgtatatatgcatgtgtatatatatgtgtgtatatgtatatatgtgtgtatatatgtgtgtgtgtgtatgtatatgtattatatgtatattctctttgtgtatttatttttgccagtttgggagatgttagaaaaagacacgatttggaaacttcaacttagggataaagttagttatactctgagagctgcagttaaaggattatttgtgctgctctgctcttgcctgcgacgtgtgggaatgatgctgagtgatgtcctcctgcttattttgcgtgatttttttttgagacagattctcgctctgtcacccaggctggagtgcaatggtgcgatcttggctcactgcaacctccacctcctgagttcgagcgactctcctgcctcagcctcctgagtagctgggattacaggcgtgtgccactacacctggctaatttttatatttttagtagagatgggattttgccatgttggccaggctggtctcgaacccctgacctcaggtaatctgcccgcctcggcctcccaaagtgctgggattacaggtgtgagccgccacacttggccaattttgcatgatttttacatggcttttcaaagggccagggtgggactatccaaagccctgttaagagtccctcttctgccaaggagcctaggaagggagcaggtttgagtgaggaaggctggtggttttggacggggaacgggtggttttggacgggtagtgccaacggtttttgtgtgcgtggtgctccttgatgtggtctgggtttctgcatttgtagtgtgtgccttctaaggatgctggaaggtgagacagggctttccaaggcctagatggggtttgtggctttacttaggaagacagtcctttccataaagcgtggtgccaaatgcttttcctcctgggcctcctgctgtgatttgtggcgtggagtttcagtgagggagggctctgcaggaaccagctccttggtctgatcctttctggacaattgtggatgggagttggcttcttggtgtcttgagagtgtcctcagcagaccccagtgaagcaggagcatagagctctggatgggctcatggtggacatgggagagctgctggccagggggctgcagggtgaggcttggaaaacagggagggggctgggcttggccccgcattttactgtggtttatttagtgaatgtcagtgctagctggggacagttgacagacaagagaaaacactggtttgattttgaattctgaagcagacattgggcagcagaggctaacatttggcatttatcctaaactttcgaggtgcccgagccttatttcctttctctgggagaaagtctggaacagagacggtgcggagcagcctctagggctcagccctgggcccccctggagttgtgctgctcatggtatcacagtgcttgtttgtttcctgtttgtatccccattgcacctggctcaaggtaggtgtaaggcaaatgctttagaatgagccagtgagtagatttcacatgatcgtctcctcagtcctagaaatgccacgtgaacttcgaacatggaaagttttttatttttgagagattggagaggtgggagttacaggctgtctccaggtcaggcagggagtcagtggctgagtttctgatgctacagatggctggcttgggtggcatgacctctgcaggacccctagaagggcctgaggcccactaccaggctcagcttgcccccttctcttttcttttttggtcctaggcctggatcagaggctccttacccacaggatcttggacaagtcattttccttcttgggcctcagtttcccatctgaaaaggcaggggctgggctggatgtggtctccctagggccattgttgcttctgttacatgatcccgccagctcacctgggacagaacgtgcattttccactctccctcctccccgcagtgagagaacgggccagtgagacaggcctttcctgttttgtcatcttaggggagaattggtgtcaggggctgacccttcactttgttctagctttgctaggagtttgtggagacagtggatgcagatacagacagagttcatatcactgggagtttcactgtcctggagcagatctggagctggaggggacttgctcaggtcacactgggagtggcagtgtcaggccagagacccttgtctcttgattccccgggcaggacacgtttctccatcctgcaggcaggtgcagaggaggaatgcttattcataggcagcacgtgagggctcctctcagctgcttatttggcaccctctttcccctccaggggccagccacacaaccacctgcctccggcctgctccccacacagttgccagaggggtctttctgactctctctgacacctggatgttcttggcacttgctgcttcaagggcataggttcccattggctacggctgtgttttcacacgtgtgtttggtcaggtgtctctggttattaaatgagacaaggcttgcattgctaaagacagaggtttaggaagtgccttggaaaaccaagtgaaacaggtttctttccggaaggatttcccagaggctttagtatggtaatgtgcttatgcatttccaagaggggagaactaaaatgcaaacgtggaaactgattttaccgaacaggaggagactagaagctaggtcttgggcaggaactgaaacctggacaggaaaagaaatttgtgaaattctctgtctccggttgtgtgtgtgtgtgtgcgtgtgtgtgcgcgcgcgcgtgtgtgtgtttatttttaatctctgccctgtctctgcatcctgattcattcatttcctttttcctcctctccaccctcacttccttttcttgtatttttaaaaattgtagtaaaatatacataacaaaatttctcatcttacccatttttaagcatacagtccagcggcattaagtacattcatactattacacaaccatcagtgtcatgcatccacagaactctcctcatcttgcaaaactcaaactcctgtacccataaaacaagaactctccgtcctgttccctcctcaccccagcccctggctacccccattccactttttgtctacaaatttgactactctaggcacctcatatcagtggaatcatacagtatttgtctttttgtgactggctcctttcacttagcatgctgttgtcaagaactatctatgttgtagcctgtgtcagaattttctttccttttttaaggctgaataatattccactgtatggatatattacatcgtgtttatcccttcatctggtgatggacacttgagttgcttccactcactcccagatgttttttcccctctctgatcctcaaggaatagaaaatgcccagccttcatttttacattttacaggtagtggagctttaaaaaagagagtactttgggaggcacagataggagcatcacttgagcccaagagtttgagaccagcctgagcaacatagtaagacccagtctctacaaaaatcagctgggtgtggtggtgcgcacctgtagtctgagctactcaggaggctgaggtgggaggattgcttgagcccaggaggctcaggctgcagtgagctatgatcgtgccactgcactctagcctaggtgataggtgagaccctgtcttaaaaaaataaaaataaaaaataaaaaagagactaaattgattattgtctctctggctgtggccacttctgcctgccttcctagccgcctgccttctgcctctcttgcctctcctgaggctgctgcagggttgatccctccttgcctcttccttacactccttcgaggcaccctggtggttcgtttcctcctcctgttatcatacactttccttgtttttccccattgttttttctcctctgtatcctggtgccaacctcagtgggtgctccctgcaggcaggtggaagaaatgatggtgctgcaggatgaatgaggctctggccccaaacttggctgctgtgactgcagtggtcccagcgggggcctgaccaggcccatctctgcgcttctgggccacttgcctctgtctggggcttgtgtcattaactaagacctgcccttgagtaaaccaccctgaggacagagaagtccactgaggtgcggtgactgaggcagaactcaatcttttagaggtttattctatcagggttgaggatgcaccggggaaaagaaacacaagttatagtaggatctgtgttctgtgctttttccaaagagggctctggtaacgtcagtatttaaaggggaaagagcaagcaggagggagagaagaaaaataaaagaaggaagggtaggcattaggcaagtggtaccattcttgtgaggctctgattagcacttagtgaatctgcattttacatgtgaaaagaagggagttggggaaagtgaatcatggtcttgcactcagtaaatctacgttttacataagataaagtaagcttatgaaattagagctgtctgtttgggaacaaaaagaaggtcagtttttgcatgactcacttcccaagcttaactttctttttctttgacatagtgagtttagggccctgaggttttatttttctttcacagcacaaagatacccagttgacctttttttttcataacagaatgatgcattttggttcagtagtgtttcctccaactgctctacccctaatttaaaaaggggagggggtgagaaatcagtcccaaatgtccctgtaagttttggtgtgatgccagcctccaactggctgacatgagcagttttgtaaaggagagaccctcttgatggcttcacgtatatcatggggtgggatggggacagtcattattgacagccagcctgtgccaagtgtttcccagcagctctctgggcgattattccagccaaggatggccatgccctaaggttaaggaacctgcttgaggtcccagagctggaattgagattgacaacctcaggctgggtggctgtacagcctgggcactctctgtgccccctgccctcactcagccactccctccataggtcaccaggggtaattccctactgcccaggcagagggctggggctggaaggggtctagatggtcacttagtggttccccaagctgagtcctgatcaaaatcatctggggaattttaaaaagaaaaagaagacttgaatcagtgtgtgctagggtggtgtctatggatgggtattttcaaacatttcccgggtaactctgatcttcagcccctgctctgatcctccctttcattttccagtccaggacactggggaccggagagatgagatgccgtgaccaaggtcactgggttgtagccagagccagcatcaggtccaaagtgcgatctcagtagccagttctccatgctctgtgtttgttcagactgccagccctgctcaatggggctctggaacttaaggaaggcctttgaccataggctgggcttgcaaaaccttggtaggaccctgcccttggctggaaacctcagggctccagccagggctcatccccaagaagatacactgccattctccaaagtgtgggggcctctcccctgaagggcgctgcctggagccacctcttgttcacaggcccatgttaggccccctgggacaggttgccttggctccatatgtggttctgcagatcacacccaggcttgagaaatgcggtgacacgtgaactttgcattgatgtgaaaaggtccaaattaaaggtgatggcaagcacagctaagtccaagaaagtgtggctcctatttaggggtggtgggctaagagacaagacacagtaccctttcaccccggtgggtattctaagttgggttagtttgttcatcaattcattcattcaacaaatatttattgggttcccaataaatcatcttactggtccttggagatctgctgtgaacaagacaaacacaaccccacctctgtggcctgcacaaccctggaaggtcacacactagaaccctatcacttggcctctccatgaatcaccgtcatgtagcccctcgacaggggactcttgtgttattactgacaatattgatggttttagacacatattatcccatttaattttcccaaccattctctcaagtggggaaactcaaacttagaaagtttaatgaccttgcccagggtcacaccatgagtgatggcatctgaattcagccccagttctctctgattccaaagctggggttcttgacagccacattgtaccacctggtacccttgctttttgtcaggggcaagtataagaagaaggcaggtgacacgtgaagctttatttgctctaaaacttgagcgatttcatatgtcctaaaggaggagttttgcctcttccttcccagcatgaacacttggcatggtgtgtacatcttcattcgtttggtctggccaacagccactcgggagctgaatgaggtgttgtgaccatgacctgggtattctcttggttcagataccttcttggttggcacattcactttctcgtccttcccttggtctttcttgcttataatatatcccttttttaatttttaattttttttaagacagggttttgttctgtcacccaggctggagtgcagtggcacaaacatagctcactgcagcctcaaactcctgggctcaagggattctcccacctcagcctcccaaatagccaaggctacagaggtgtgccgccatgcctggctaatttcttatttttttgttgaaatgaggtctcagtatattgcccaggttggtctcaaactcctggcctcaagcaatcctcctgtcttggcctcccaaagcgccaggattacaggtgtgagccatcacacctagcctaatgtatcatcttattaaatcagatcaaatcctttttgaaaagacttaaaattgaaatcactttaaaaaacgaaaggatgcagggctaccctccctgggaccctggggcccaggtgtcttggcagctgccttgggctgggccagaagatgtttttgccagtctgtggtaggaaaaagggtgcagagtagcgagtttttaataaagctaaactggccgggtgcagtggctcacgcctgtaatcccagcactttgggaagccgaagcaagtggatctcgaggtcacgagtttgagaccagcctggccaacatagtgaaacccaatctctactaaaaatataaaaaattagctgggcgtggtggagggcgcctgtaatcccagctactcaggaggctgaggcaggagaatcgcttgaacgtggcaggcggaggttgcagcgagccgagattgtgccactgcactccagcctgggcaacagtgtgagactccgtgtcaaagaaaaaaataaaaataaagctaaatctaatttaaagtaccattttataatcagaggtagtcttccttacttttttttaagcattaaaaatgccctttcttttacaaaatcatgtttgtggtggagggcagtggtgattgttgcttatattgttattgtttttgcgtcctttctgggcaaaataaaaagtttgccttggtgtgtccatttcctttgtggttttaatagctggtgaaatctgaactatgaaaatgaccactaattcaggtgattggttttcaccgttcctccaagccctggggtacctggggctctctgtcccggtgagtgagagggagccccagagagtcctttgcccatcttcaatcagagaagccctccttttttatatgtaggattagattttttttatgattttgtttggagataaaaggatacccctgccaaaagttgaaaagcttctcctctaggatgtgtgttgggggggagtgggggagggagggagtcggggagggaggaagggaagggtgggaggaaggaaaggagggaggcaggaaagaaggaagggaggaagaaggaaggagggaatgtagtgactttggtgggactgagccatggtggatcttctacttggcgagtatttcttgcctatatactagtcagagttctccagagaaacaggtaataggatgtgtaaagtctacttgggtttgtaagaccagcctttggttgaagaccttccttgggtcctagcagacagaaaccaggagagacagagacatctatatccggctacatagagaggttatctgtctaactctctgcctgttctctatctatatctgtctgtctgtctgtctgtctacctacctacctgtctctgtctgtctgtctgtctacctacctacctatctaatctacctacctacctacctatctgtctgatctacctacctacgtacctacctacttagaaattgagagatttactttgaggattgacccacatgattgtggggactagccaagtccaaaatctgcaggctggagatttagggagagctgatgttacagtttgagtctgaaggcagtctggaggcagaatttcttccttgagagagacccagtttttttctcacgaggccttcagctgattaaatgaggtgtatgtacccacagtatacaggttaatctactttattcagagtctactgatttaaatgttaaactcatttagaaaatcccttcatacatacatctaaactagtgttagatcaaatatctgggtactgtggctcatccaggctgacccataaaattaaccatcacacctgtgcaagcgcttttccctcctggatggtgtcctagggatgacagaggaggggaaagccaggtctctgcttcaaggagacaaaattatgcatacgaagaaattaagaatgctgctgtgtctgtggagtagccattcttttattcctttactttcttaacaaacttgcttttacttaaaaaaaaaaaaagaaattaagaacaagaccatttatatttaagtgccaacttatgaaatgtaaaaagggatttagaggtgacaaggcaagtgagggctggaggatttggagagatttcatggtgtagggactgaataggagcttccagaacatggaggtttcagataagtgaggacacagaagtcttcacaaccagagtgggcaccacaggacaattctacatctatctaggactctgagtttttgaagggtttccatatgcattgtttggtttgctgcttgcaacaaccctgttgttttaactgaaggtcttagggcctagggattccccagaggccacacaacttgccagtggcaggggaaggtcttactcttccacagccttctctgtctttctccctttatggagcataatgaaatgtacgtgcacacattcatgtagatttcattatgtccatgtagaattcattttgatttcaaatatgtttccttcccagagaaatcctgtgaaactatgacattgtttttctctctctccttctccaggtcttattttccttctttaccatcctgattaactctatttttgtttgttttctcttcttgcccgctcccagacacgaatgcagagtttgagtccagatcccaaagcccagtacacaagtatctacggagccctcaagaaaatcatgcggaccgaaggcttctggaggcccttgcgaggcgtcaacgtcatgatcatgggtgcagggccggcccatgccatgtattttgcctgctatgaaaacatgaaaaggactttaaatgacgttttccaccaccaaggaaacagccacctagccaacggtattttgaaagcgtttgtctggagttagaaagttctcttcttcaacacgtccctccccagggtgttcctccctgtgacccagccgcctcgacttcggcccgcttgctcacgaataaagaactcagagttgtgtgtgcaatgcacacccagacacacgcacgcacacacacgcgcgcgcacacacatgcttttttctgttcccctccgctttctgaagcctggggagaaatcagtgacagaggtgttttggttttattgttatgtgggttttcttttgtatttttttttgtttgttttgtttttaaacattcaaaagcaattaatgatcagacataggagaaaccctgaatagaaacaaaacttttgaatgctggattcaaaaaaaaaaaaaagttatctggacagcttctttgagactatttaaaaactggtacaacaggtctctacaacgccaagatctaactaagctttaaaaggtcaagaagttttatggctgacaaaggactcgcgcaacgcagaaggcctttcccaccttaagcttccggggatctgggaattttacccccattctcttctgtttgtctgagtctcatctctctgcaagcaagggctgaaatcattttgtttggttgttttgagggagagaggcggggtgggggggtgcaaatctgccagcagctcttacgtaaggcatgttttattggggagggctgagcttttattttctcctctccagtggggttggcttttattgtttcttgtttgggtttggaatggaaatatggatagcagcataaagtacttttattttgacaaaattcatttttttcaacaatggagacatagatttgacccacaataacttctccccctctctttttactctgctcaaaaagcatctctcctcccattacccaaccttggtcataagtgtgcctggctggtttgcagatatttgttctgctttgtaaaaattggccattagtgcatttattgagatgatctctaaagagctatgccctgacctacccctgattctatgacattggggcccttcttttgctgaaactgccttacgtaatggttttactccttgaaagagatttgacggaatccattttatgccaagtgctgccctgcactgtttctgcaatatgtggtgtatgctgtggtgatcttgctgggaatgattataagtgtgtgtgtggtgggggagtgggtattacatgcattgctgaagagtcatcctggtgttcctcattcctcccaccttcccgtggtcattttaattacggggcagtgtcaccgcaaagggaggaaactcaaagccgaaagcaaaattccaggcctgattctggcttttgaggttcctggttcttgaagccaggcctgacccgactctcagatggggtcagtcccgtcgctttgcagactgaccctggaaatctacaaaatgcagattttcctgatttcctcttctcttgcccagttttttttttttttttttttttttttttttaaagcctggattgtaaccagattttcttttttcccccttctcagctgtagatatgatatctcctttcagggccccagcttaagggcaaagtgagttaatgtgtagacaaaggcgagggacaagagagagttaacatctagacagtggaaaaagccatggtgtgtggtttctgggaaccaccaacacttgcaggtttagctttttcccagggttgactacaagaaagaaaaccatgtttttgcaagattaaaatgtggttgagtgtgcctaaattaaccatccccatttttatcatatttccaccatcacttcagggttttaagagtcagtgctcacctgggcggagctggtagtacattttgcttcttagaaagctaagtcctgggttccgtctgattttaggttccaggaacttcctgagaacacccgatcgcagagggtaattttctggagtttgttttgcagggatagctgggagtatggccaccctgctccacgatgcggtaatgaatccagcagaaggtaatgtttcatggtcccagggaggggcagtaggggatgtgcaaaggggcacaaaaaatggttgtgggagagtggagaggactgaaggtgggcagagcggctcctagtctccagtcagagcagacaggagaattgaattttttactacgttatcaaaggcctcaagaaaggacgtgaacataagagtttttggtattcctgtgctcggagctactcaaagtgtgttctacagaccagcagcatcagacatcttgaggggtgttggaaatgctaattctgaggctgggtgcagtggctcatgcctgtaatcccagcattttttgggaggccgaggtgggcagatcacttgaggtcaggagttcgagaccagcctggccaacatggagagacccccatctctactaaaaatacaaaaattagcctagtgtggtgtgtgcacctgtaatcccagctactggggtggccgaggtgggagaatcgcttgaacccagcaggcagaggttgcagtgcaccgagagtacgccactgtactccagcctgggccacagagccagactccatctcaaaaggaaaaaaaaaaaaaaaaaagggaaatgctaattctggccggcatggtggtttaaaactgtaatcccagcactttgggaggccaaggcaggcagatctcttgaacccaggagttcaagaccagcgtgggcagcataatgagaccccgtctctatgaaaaatacaaaaattagccaggtgtggtggtgcatgcctgtagtcccagctgttcggaaggctgaggtggaagaattgcttgagtttgggaggttgaggctgcagtgagtcgtgattgcaccactgcactcagccagggcgacagagcaagactgcctcaaaacagaaaagaaaacaaaggctaattctcaggctttacaccgaacctactggatcagaatccctggagctagggaccagaatctgtttattggtgattctgttgcatgcttttgcactattctaaaacctatgtgtgcatacacacacacacacacacacacacactcactctcttagcccttgttaacccttatcgatcctagacaaatgtatggggaacccatcagaggctattctttagggctagtgttcaatttgactgtttttaatatgaaagattatggatcacatttcaaacagatgtgaacgtggagagaataatacgatgtaccgcagtgtgtccatcactgttcttcagaaattcacattgggtcattttgttttagccatctctttccacattatcttctttttgttcttttaaatttcgggggtaatatgaagcaagcctcagctgggcagaccagagtctgttccctttttatatatcccggcgtcttagccgggtactcgtgtctgaatagtgagtaccttttgggcctggcactgggcaggccttcagctgggtcattctctacctggcgatggctttaggtgagttgtggagctcttttcacctttttgcctcatctgaaaatagttcctggccagaagggagaattggtgagaaaagtttcaacattttaagtctcatgctataagtttgcctgtcttttgtctttcaaggtgaagctattaaatttgttctcagctaccctccatgtcctagcagatagaggacttggtctgaccttcagggttgtgatggggcaggttgggaggtgggcggggagtctctgtggtctgggtgctgaggttgacccgatgggcaggtgaagaaaatcaccttctccattccccttgatttctttatcgtgtgccgcacgaggcatgctgaagggacacacacctttccccctttttatttacaaagtagagagctgagaaagacagctcatgttctgttttgttttgtacacattatctttctcaagagatgtgatgtccttaagtaaactgacctgccttcatggcttgtcctgtaatgaatgcgttcaagacagtgttttggggacaggaaagaggcattcttaggtaagcggtggtggggggtggggtggggtggagaggaaacccttctaggaagtagttcaatgaaaaacctaaaaatgcccaaataaacattcgcttacatattatatatcttgggcttctttttatgacagttcattcagggacccagtcagtaaacaggtagttaacttcgtgtaaccaagcaagggttttgtttatcttttttaaagtagaaaaaagtgaggctcaaactctctctttctccttgtcataactattggtttacagtctttatttgtttaaaagtaaagcacattgtatgtatttatttggcaatacatgaggccattaaaaccctgagcctaaggtaccacagttagtctcatttgcctcttgtcctgtgaactccacttagaatgtcattgaacttgggcagacataattctagtgtctgttccaaacgcactgtgtcacagaagctagaattaccattagaggcacaaacccctgagaatacacaagggggcacgcttccagtagatgtgttggggaaggaggagggcagaggggacaggggacaggattcagctttgtggtgggtcctgagggttcctaccaggggtagccaggatctgggaaacagatcagcgactctagtctgaagtggctgcctggttcgggggctgccttcagcaagattcaggcaggagagacggaaatagccaccttccaggcgtgagtcctggagataaaaatggattttaacctaggactgccgggagctggccctccgcggctgctcagactagggctgtgtgtgctggctctcgcctgtttccggtgtctaactggcttgtttctctttatggcttggcttcattccgacctggggtggggccacatccaacccactgcccactggctgtccgtctggcctgccccgcggttccaaccacagtggtgaagcagcgcttgcagatgtacaactcgcagcaccggtcagcaatcagctgcatccggacggtgtggaggaccgaggggttgggggccttctaccggagctacaccacgcagctgaccatgaacatccccttccagtccatccacttcatcacctatgagttcctgcaggagcaggtcaacccccaccggacctacaacccgcagtcccacatcatctcaggcgggctggccggggccctcgccgcggccgccacgacccccctggacgtctgtaagacccttctgaacactcaggagaacgtggccctctcgctggccaacatcagcggccggctgtcgggtatggccaatgccttccggacggtgtaccagctcaacggcctggccggctacttcaaaggcatccaggcgcgtgtcatctaccagatgccctccaccgccatttcttggtctgtctatgagttcttcaagtactttctcaccaagcgccagctggaaaatcgagctccatactaaaggaagggatcatagaatcttttcttaaagtcattctctgcctgcatccagccccttgccctctcctcacacgtagatcattttttttttgcagggtgctgcctatgggccctctgctccccaatgccttagagagaggaggggacggcacggccgctcaccggaaggctgtgtgcggggacatccgaggtggtggtggacaggaaggacttgggaaggggagcgagaaattgctttttctcttcctccctgggcagaatgtagcttttctgcttcactgtggcagcctcctccctggatccttagatcccagaggagggaagaaaatttgcagtgactgaaaacagtaaaaaaaaaaaaaaaaaaaaaaaaaaaaaaaaaaaaaaaaaaaaatttatgtatataaaagttgcattacacagtacaaaatagatggataatgtttatcctttatttttctatgtagaagtttttgaatttgtgtgtgtgcttgtgcgtgtctacacctagtattacggctgggactctccagctgtttttgttgttgttatgtttttaagagggttgaattcttccatcaggtgaacgaaaaaggcaacaaagtaataaatcagtgaatgtggccggcagctgtgtttagcccctccagatggaagtttcacttgaatgtaaaataataaagtttatattttgaatttctcttttcatgggggaaaaaaggtacgttaaaaaaatcaaaataatgatatgtcacttgcagctacctttttttttcttttaaattcaatcagccaccttcatgtgcctttttcctttgtctttccccaaaattccaggaccagagatctggccctggcctattttctcttgctgtgtacacacacgcacacatgctgggtggcaggatctcgcccgctggagggtggtggagcccagtagaattggggtgactgggcataaacctgctgagactgcttccttccctggttgtgagtgatgtgaatgcctgccttccccggtcagcacttagaagcccttgataggcagcatttggcgacttgtggggcaggtgtttgggataaatcctaccttcatcctaggacttatttctgcatcagccttttaactcaggcacttcaggtaacgtgatctatgtgtgttttgactgaatctcatctcctgtgtttccctgtgcagtctagggaagcatgtctccagtctttgtccctgtcttgtcccaaccattaattctcatgtcacagcttctcactgcatgtgacaagagccaggcctatctgctagggccctgcggctgaggtctgacctggaccctcatgcccgagtcggaagacccctctccagaagccattctgcatccttgtctgctctgcgtcacccgagaacacaggcttcgcagcctcgctttctgaaatggtgtgtgccgagtcagattgccgctcagagaaaatacaagcccgttttccctagctgtgccatttggtgctctgccaggctgccgtgcaagggaataccgacgagacgagctgcactgtctctgatttggagccctcaccggagcttgtctttaaaaatgagcaggaagctcatgtatgtttgcatttcagtgagccgggtcctgacctgccgccacccatcacggtcagcgtggtgcatcttaccgaggaggcgcaggcctggattcttttgagtggtgctactgcctaggaagtaacacgtggagaatttccatcttgggaccatgcacacagtgccttggggagtagattttgccctaatagcgatgaagaattttatcagtcagtggagttcctttttcagatcagggatgggaaagagccaaactgggtacctcccacgtgtgccccgtgaacagccctttgcagctgggctgtggggcttggctgctgccctgtcccatctggcagttaacgccttctccctgctctgccccccactccccaaaaccagttgcagcctcaacccacatggggatgtagaaagccgtaaagtccacgctactgttgaaaatgtttacatctccgctctcaacctgccttgggttcgtgttaaatggtgttaaattctgcaaatggaggggaaaaaaatcaaattctaaatttcaaagtagaatttaaagcaaatttgtaaaaaaattatcctaccaccccttttggtccacttaagatatgccacgctgaagcaaggtatttcctactggattttgctttcactggtgtttagaaaataaacttgatttctctaggagcactcctttggttagagggatgcaagaaggagaggtgaaggtggcgtgtggtggctcatgcctgtaatcccagcactttggggaggccgaggcaggcggatcacttgaggccagcagtttgagaccagcctggccaacatgatgaaaccccatctctactaaaaatacaaaaaattagctgggcatggtggcaggcacctgtaatcccagttacttgggaggctgaggcaggagaattgcttgaacccaggaggtggaggttgcagtgagctgagattgtgccactgcacttcagcctgggcgacagagtgactctgtcaaaaaggaaaggcaaaaaccggaccctggagctctgtgggccctgattgcaggcccctccctgtgtgatgagggatgagtcagcttggggagccacttggccagcctgcatgcctggtcatcaggaggttgagaaaagccttgaaagttgtgaagcactgagcagatacaagtgtttgttaattttgtagaaattaactttcccatctggcctttatctccaaagttggtattgttgctccacgcagactgcagtccggtttcttattgtgactttgacaatgcaaagtgcaaaataggaagaggcctccccaccccactatcccaccctggtgaccaattcagtgtaacctttgcacgtactcagtcattggtgtctttggagtgacatctgcagccagttagtgccacctgagtacagcactcgtacttttacatgatgtgtgtgtgagtagctcttctgtccaaaccatgatttgaggttcaactacctgtagatcaaagctttattttagaacgataaactgattttttccaaatgggtgaaatcttctccccatgactatgttttcttaactttgcattgaatctatttactgggttacattctatgtgtagtttgctttcttcatttttttttcttttaaaatgctcatgtcttattccaagcaccttcctccaaagtccccataaagctgcatctccaacacattgttatgccaataaggttttatttaactttatttaaggatgattgtgtctttgaatgacaaatgtactgctgcttcctacctgcaagacgaacaatgtatgtttcaagggtgagcaagtgttatttcttaaatttctcaaatgcctgtagtaactattgtttctgcctctcaattgttgccagctctttgaagaaggggagaattgtgtgtttttgtgtggggatgtttctgatatgctgctacagttgcaaaacactggagctagagaaaataaagtactgatcttcgaa

SEQ ID NO: 464 - DNA, 204606 bp, Homo sapiens
  source 1..204606: mol_type = genomic DNA; note = NC_000009.12:c27529814-27325209 MOB3B [organism=Homo sapiens] [GeneID=79817] [chromosome=9]
agtcgagccccggccggctgcgcggcgcgctgggtgcatgagggggctgctccggagcgacggcggctgcagctggagccaggcgctcgcccgtccgccggttggctcgccgggacctcgcgcaccggcggcagagtcccttgcgtggattggcaagcgacgccccacctgccccgagctcaccattttctttcgcgctggctgcagctgacccggcgaagggagccgaccgggccctgggctggaggtaaaaccccacggtgagtaagaacccgctccaagctaggggaggcggcgcagcccggtggctgctcgctcccgatctcgcccgggcgggcggcgaggtttggggcgcacctgggcgcgggtgcaagaaggtgcgggaggcggcggaccggtcttctgcccgccggccacgggcttccggggctggagtcctcttcagacccctgccggcgcctgggtttctggccggctcctcgtgtgcacttcccggcaggaacaagggtcgcccactttccaccccgggatcttgatttgtccttgatttgaaaagatataaatcaataagatcgtccttctttcggggtgcaagactccgagcccatccccagccgcggacgcctgcagggtgcgtgttgggctgtgggtggcgggaagacaaacttttacaaaagtgcgcctgggctgggggacaacgcttgggcgtcctgatcctgagggaggagtctcggcttggggcagcgtaggggaagtccgcaccgtcagccaggtcgcccccggggctgacgatgcctcacggaggtggggagcgtgtaaaggccgtacaaatcgcgcttaactttggggccaacaactgtcaaacatctggaatcccagcccctccctttccctgaactggggaagaaggtgaaaacccttcaagttttctttgattgccccttcccaccttcagacccctgctgggagggtaaagcgccgacccctggtgcctggcaagtaccagagactctaaatctctcgggatcccccccctcgcgctctttcctgaccctctcccctaaccctccccacagagatctctctacgcagccgactgagatcgtggcgaatggccttttgtttctccgcgtttcccctattgtttgcctttccaacatctggcggggcttggggagagaaggaagcccctctggtccccctccccggcccccacgccagctccggcaggggatcccagctgggaaagtggaggagcccgaccccagcgaggccgccccaccccgcccttgtggttagagggcggagggaaagttgttccttccccgcctccgctgctgcctgtggcccagggcgcatttctcagatctcagcccaggcgcgccgcaaaggctcaaatccgagaaggtgctgctttcgagacagtggaagcgcgttccgccccaatccagagcgtccagtggttggttccagaggatttcaatctctagccaaaggcgttggggctgggccgctgctagggcagtgggaggggatcggggcacctttggtaggcggaaagctgagattctggggtccacaagtttccaagggcgggagggcaggctagtcgccaaaaagagaacgaagatgcaaataacgaggaagccttatgacgttgcctggaaatagtagtgtggtggttcactccggaatgaacgtggagttctggctttgagtaccgctccaagtttaaatcccaagtcccctttcttcattgtagaaaaagaggactcagacgacgcaacacagatacggctagagcacagttcctgcttccacgtcccagagaacaagtggcttaggatggtcccgagttcccctgtgggtgcgcttgttgggttgcaggcggccctgtttccctgcacaagtcagatgcttacacattgtgttcattcttagtgtggattattgattaaagaactggggcaaaagcaaagtagctactctgagaagtcagggtccccagatggtgcccagcgagttgtcttgcctctgaggggaggctgactgagactgtgcacctgttagaacctatgctaccccatagccttgcagttgacttgctgttgccagcttttcctgtgggatccccaatgagtccctcttccaaggaagctcaattacacttttgattcctcctcaacccaggggaagaaagaggcttctgtaggaacattatgatctatgtacccactcagacattgtcagtggataccagaagcttggctctgcacagctctgagagttttccctttgcgaactcaacagaacttttgagtttccatttaacataaaagaagtgagactgctaagccaggaatgcgacacatagagcactttctctagtgatttctgggtattatatctctttaccttcccaacggtggaaccaggaaaagaaaaaaaagcaacatctttgaagtactgcaaggcactttacaaacatttcattatgaaaatgatccccaaggaaggattcctttgaaatttagcagcagcaacccagaagcaacaaaaaagaccaaagttactcaagaagtacccaaaggcatcattaacaaaataaaagagcatttcttgtcttggcctaccccgctaaggaaaacagggtaattatagtggaagttaagcttgtacagtttcttttagaattaaaaatcttcccaaaaaaatcactataggaaaaaatagaaaatatcgaatggtgaaaatgaatgtaaaagggggagatatcataaacctatttccttggaataaatttcggaagacgtgatacctaggtcacaggggctgatgcgttctttaggatattgaagattgccatatttccctgtagaaaacatgtcccagtttactttcctcccagtaatgcacaaaggctcctataccttacactccactcacattttatattgtcattctttttcttttctgtcatactgatgggagtatcttgtcatcttattttgcatttaaaaatcaagttagattaaacatttttcacattgtctgtagtatttcttcctttgtgatgatgtcagtttgtgcccttgccttttttccagtggagatgttatcctttttcttttgattagatgtgatctttaaaaaagcatactgttctgacttctacccctgccacacattcagaaaatgtatattaactgaaagctcagctcggctttctcagccattctctttcctccaggatagcaaacacttggcaggactgcaaccataaatgactaaagtaattgacctcattccagtaaagttattagagagaacaggcaaagactttattagagaaagtcatgaaaaatagcaagtatatattttatgctcagtagcttgcatgtcctaactcctttacaagcttgtagtactatttttaatctggaacaactctgctgatagttatttttactaaatggtttgcactaactcattttattgtctgatccttctgctgatagcctgcatataccatgatccacaatttgttcttgttcttttaaacatctcttctaacttcttggctgaaatttgcctcacttttatcataagactttctttggctataacatttgggccctgcgcttggaataatcttgaatctgaacagtttggcagcatgctgttagtggcatgagcaggaaatggcttccaagggcagaaccaggtacatttcagatatatttcacccttttttggtgcatttgcgtagccacaatctctgttaattcttgcttgaaggtagatgattctgaaatggggtagatagaggtgcgagaggaagagaaaatccatgtcagctaggtggtgaattaatatagatgaagggccgtgctagaaaagtaaataatctaggtagtctggctgcaaagtaacttttaaaaagataaaagatattaaagtattatgtattattggaatagctagttaaattaactcacagaatgtagtcttctaactaggaaaatctaatgtaaaattgttccatattatgactctggacattttatttcaggcacatgaaaaacagtaaaagacagattctgtaccatacttttccacagcattttccatgcctttagatgtaggaatcaaacaatatacatcaggaatgaagagtgtgctacattagaatcacagactctcaaaggttaaatgaaagcttaatggtcgtctaattcaaccatccatccaatttcactatggatcttcactcttaaagtaatgaaatactattccacaagcatcaattcaaacaaaccaagctgagaaggaaatgggccagaaatgtcaacctttttccccccgagcaggagggggaaaatgcaagagtattgactctagggagcatgtataagctcttttaatgtgctgaattttcataggataagcaaccttggcagcaaaacagttaagtcattgaaatgttaccattttgcaacattctctgctccctatcctctagccattgtcttggtgaagtccacaggtggtatatatagcaaagctctttcaaaatggccacagaaaagagcaagagagaatagaagaagacggagagggaatcttattcctttaaaaatgtcttaaagactttctaaggagactcttggtcaccctgaggatggttggcattacctctccttagagaggtgagtgtccctgatgttccgaggctaccagtccaactgaggacaggcttacaggacagcacaacaatccttaaaaagaagttggaggaggagaaggagaaagagatttcggagggaaaaggaattttaattccaaaaatataccttatttcctcctgaatagagctgtaaatttgtaaaagtaatacaaacatcttctgatttccactcggacaatctcccaggcacagtcactgtatttcttttctttcaggaaattgtctatcctgtggaaatatctcctcagttccaggctgctcagctgggggaccctggcttctgagggtttcatctcattctctttcatttctttcatgtcttcattttcattcttgtcttcctccaagcattggttcaggtactctgcttgctgatcaagtcctatttggatttgtttgaggtgtctctctttccaatatttgaaggtgtgttggctgaagatgttgaaggcctgtagggacatttcatagaaggccttcttgatgtccctcttcataggttgggtgtattgcagaaactcttggggcaactcaaaagctatgttttctcgtagacattctacaggaaatgaattgctcatactactcagatgtctcagattttgccaggtgactcttctcaggtgaacgttcagtaagttacagtccagggatagggtgccagcaatgaatatacccataaggatctcaagccacaaacacttttgaatcatatcaggtttggtgctcattttttttgcaagctaaaaaatccagaagatgtgtatatgacaatgatgttttgagttttccttcatgtgcctttatatacctgaatatcttcagcaggaggagttttctcattcgtcatttcacagttaaccaaggttgcggcccctttcctttgcctctgaggctttttttttttttttttttttacttcgggtgactatgccgactttggaagtgataacttttttttttccctgaaaaatgagcaaagaattaccatcgtgttaccttaaatgcctggatgatccatcccagcactaaggaatcatcataacaagactgatgcagggtatttcagaaagccaaaagctgtgagtccatgcactcactcactcactcactcacccaaatctattacataagagggagtgatccttcatgaaaatatattttttgtacctggtgctatagccaaacatcctgtctcattgagttaatcatagacattgaccaaatgactgtgattatttgattgctaggtcaccagagcacagtatagtttaggtttttccaattttgttaaattaagcttctatatttggatattttctctttttgatttttctggatctccaaaaagatgaagaatagagctggcacttactaagtaggagactaagttggcttggttttctgttgcattagaaaatgttgataatctctaaatatccttttcttcagttaaatccatcctggacttagccttccatatgcctctgatacctttcttaaaagtcctggagggggttttatatttgagaatatctttctgcctcattaacttctctcttgtagtatcattttcttttcttttcttttcttttttttttttggtgcagtttaggcagtatttttaaacttttgcttgattgcttgattattatatcttcttgcctggtggttctggattctgtaaaggcttttgtttgctcctgtgtttgttgtgcactgaggaggtatgtgagtaggaagtcacccatttagctaagtgaattcctagctggaccaatgttactgtggtaatgatggctatctattgtttatggtttttactttgtttgaccaaataaccttcctctgattatggttaaagcaaatggattcttttctccaggaaaataaaatggattgtcattttaaaaaggtagcttattatatcttctcaagaaaaaaaagatatacattaatttgcaattaagtcattgtaaaatggtaaatagccacagttccacaaacatggcagactttgattgaaaagttggcttaaaaagttcttgtctaaatcagttgactgcaccaaaggctaattgtgggtaagtgggatttcttaaaatcctggcttttaggaaaggtttcttacggaaaaaaatatatatatatatattattctatttgttccatctacataaattcttatttcatgggcagatttcttgggctgaccaaatttggaaaacattaagaaaacaagcccttttatatagcgttataaattgacacaaccttcctagagaggaaagtggtgatatggatcaaaagccttaaaaatgtacataatatttgactcagcgattgatcctctaggaactgattccccagaaataatgatgatgcccttaaagacttagctgtaaggaagtttgtcacagcaaaaaatggaaaacaattttaatgttcagcaataaatacttagttaagtaagccatcagtagaaaacatatatgtaagcactaaaaattatgtgtgggaatatatttggtcacttggatagatacactttgtagtttaaaaaacaagcttatatttgcatatagaggctgataccacttttgttaaatatagacatatgcatatatatatatatatatatatatatgaaaaaatgtcttgatatatatgcaaaaattttgagtcactatctctaactggaagaataatgggtggtttttatttttatatttttatttacctggattttttaagttttctgtggtgagcaagtatttctttttctttctttctttcttttcttttttttttttttttttttttttgtgagacggggtcttgctctgtctccaggctggagtgcagtggcgcgatctcggctcactgcaacctccgcctcccgggttcaagcgattctcctgcctcagcctcacaagtagctgggattacaggcacgcgtcaccatgtctcgttaatttttttgtattttagtagagacagggtttcaccatgttggcgacgacggtctcgatctcctgacctcatgatccgaccgcctcggcctcccaaagtgctgggattacaggcgtgagccactgtacctggccaagtatttcttatttaataagagaaggctgtttttaaaagaagatacattaaaaaaggaaaaattattatacatctgaaatgggatcaatactattttatttgtttaaacatttctactctagagtattttgaaagaaaatgtggattctccctaaggctcagttccaatcagttgatatgaataacacacagtatgtgggaatatactattcttgcagccatgtttatacatgtatatatacttataattacacacacacacacacacacattctataaagtgcaaagcctctctgagggccatggctttttacatacctcatataacttctctacctaaaacttcttgaactgttccaattagaactgcttgttccccattttgcttttacgatgccttggcctccttaaccatgggttttaaaaaacagataattgtataagtgttggtctcccaatttagtgcattcccctcttccctgaaattgcccgtggtgcttagtatacttttcactagtttgagacagttcaatgatactaaccaagctaaaagattgttcagttctgctcataggtgttggagatggctgcacatttggctattgtcattcgtcttgaagttgcctgtattttcagccatgcacagttttgtcatctttagccctctcaccccaaatttcctccctttactataattccatattatattctcatttatctaaaaatgtacttttgtgtttatgacatttccgtcactggcctaggtcctgaagaaggaggaataagttgtagtgcatgatctcgaggaggctgtggttgaagaagcaggcatgttctgagtgttttaggcaggaggagtaattcttagggttccccaagagcaaggactccattccccatgttctgtaaacgttaatagatgctgatattgacaatattcatgacaaagaaggaaagatggttggcatacacatctgtccttctcccaccattaggattgcctgtcttagcagataaaaatatagaacactcatgcaatatttgggacatacctactaaaaagtcattcattgtttttctgaaattcagatttaactgggtgtctttattttatctgacaaccctatccaccatgcaagctcccactgacctctcacagcagagctcagacgtgacatcccctgcagagagccattcctctgctactcttcctcctcctgcagagttacatttgattgcatttctctatgctggctttacatgtgcacatacccgtaacaagtgtacatggcaaagaggtcacctgtcatactaaaacaaaataatactgacacacacaaacatacacacacttgtacactcacatataatcactctgattagaagcattattgaatgatcagtcactggtcatacctctgttctgtaaagccagaggtattgaatgtatctcaaaaatataatcagaaaattgaaaacaatgacagtgtaaggaaacattttgactcctaaattcgtctggcataactgctgagtttgtcatcagtaggctatgcactgacatgctaacatggtttccatgatatctgttcttatttccctggcatggcttgagatcgtttatacatgttcaggctttcctcagagggagggctggttagcaggggctgctctgttgtttatggaattgtgtggtgtctatgtggattatgagattaactgtaatggacaaggcagaatttggcaaaatggagatgagacatttcagtctagacgatatagctgtgattcagctgaggggcatttggcatctactgataagatttattgctctccatgaaaagacaagtttcgaatcaggacgagagtaacacattgatcatccatattactcaattcttgaaagtacattgttccatttgtagggtcattaggcgattgagcccagtagagagcccaggaaaaggaagccttgtgtccaggcctagcggtacttcccatggggcatgcagaggatggtcatcacaaggttgtgtgcagctattttatcctcagacaaacgcagtcacctctggcaactagatgtttcactcattctcactgcctcagcattggggtcagcctcatttggggccagcttgtcttctggtccctttcttggctcttctcttaatgatgaccctgatagagaaactgataatgactattcagggaatactgtggatatgtgcatatggtaaaaattcaaacacttcagggcaagcgaaagctttgcttaacagctcagcctcatgtcatgctcctctcctcccctgcggcaactacagttatcagtttggtatgtgtcctgtttgatacctttctctctactaagcaataagttctgtgagggaaggtataacaactggcttgtttgctttctcttaaatgctcatagggaataggagagacctggatcatatccatgggtggcagtaggaggacttgggtgtatatttttaaaattggcaatacaggattataaaaattgtgatatgctttgaggttgaatcctagaagtttatctgtgtgactgtatataggatatcatttggagatgatattaaaaatctatattatcagccctttatggatatgaggtccaggataaatggctcaccagacctcgcctgtgagagagccaggctatcacagcacctggcccatagtaggtgctcaataattatttgttgggtgactgaatgatgataatgaagccatgtcttaatgacagtaaagttatttggtggtttggttctttttgtgtagggatatggagaggacaaagtcagatgtcggggaaaattaagggaattaacagagtggtagatggcaacttaggtgtccatttaatgtcctatactacttctggtgcattctccttgggattccccgaggctggtcagatcatgagcactttcgtacctctactctagtgatgtcacacagttttgtatttcttggttgattcatatgtcttcccctccagaagaaaaatgtgtctttcttagttttgtatctgtggcacttcttacacagtaaatgttagtttaatcaaaaactgccgtgtgacttcttatagttctcaaatctgattcagtaataacctgtataggcaaaactgctgagaagttctaagaccattcctctccaccacccccttttgctgcttttttgtacatgatgctccctgtagctgtcatttaattttatcaaccttagaggggctctttggacaaactaatatccagttgtcttttccagcccaactgaagattatgcacgtagtaacttcccacccagaaataatttgagctgttggaaaagaatccctgataaaaagaaatgtagcatgatggaataagtatctcagtaaataaacgtgtaccatcagtaaaacctactctctgttttaggatgaccagaacagcctccatccatatcctcatttcagtgttgatttccctgggtccttttgagcccgaatggggcttttacttctgaggatgttagtaagaatttcagatggcaggcatgaaaaatggatgtcacctaccagaataatccttctctttactcagtgaatagatgtggatttttttcctagatcacatccaagagtggctgtaattgggaagaaatgatgagcgtgcagtgggtgatggacagaaatgtcctcttgtcttgggtaaacattttaaaaggagttggcgttgtggagatgaagacagtgtcttcttttaattaccatcagcttgcatgtggtcataaggtttcttgacatttctgaagaacaaagaaaggtattatgatagaaaaatttaagttggccttacttagcctggcagaggattcacatgctgcaaatttaaggatttcttaagtgtctgaacaatgcctgaggttgggggtggtatctaggaataatcttctagagcaagggggtggactaagtggggaggggtctcttttcttcctgccaacatccctccccgcaggtagcctgagaagaagcttggaatgggtttcctgagagatgctagactttttcccatgtctgaaattaagttatttatatactcacttacttgtttgttttctttgttttccattttatccccggtgtttagcacacagcgtacactcaataaatatttattgaatgaacagatatgcatttcagtattttatcttatgagtatattttaatctaaattgaatatcagatcagttcagtaattctacctctttttttttttttttttttttttttgagacagagtctcgctctgtcggccaggctggagtgcagtggcatgatctctgctcactgcaacctccgtctcccgggctcaagcaattctcctgcctcagcctcctgagtagctgggattacaggcatgtgccactacgcccggctaatttttgtatttttagtagagactgggtttcaccatgttggccaggctggtctcaaactcctgatctcaggtaatctacctcggcctcccaaagtgctggaattacaggtgtgagccaccacacccagccaattctacctcttgatagaattgtataactgtgtaaatatagaatgtggacaataaatgatagttatcatcatcatctgttgcctacagtgttagacacaatgccaaattccaagaatacaagggaaaacaagacaaatacagtcccttgcagaggttcctggaggcagtgatacccagtcttaatcttaaaaggcaagagttgatgagagtttgaattaggagagtgatagcaggtatcaagaagaagacaattacttagaagttaaggttggcaacttttggaaattgatttggaatgggaggcgggggtgagaaggaggaaatagactagggagaaactcagttttctagctaggtatatgatcgtgccaccagctgagagatagcctgtgggaggaggagcaggcttaggggagcaactggtgagttctgttatagacaagttgctttgaattgtctgagatagctaagtggagatgtctatccagcagttggatatatgggcctagacaagagcagaagactgatgctgccaggagagatagattggaaggtatccacagaagctgtaagtggtaagactataagaatcagtgggtctgtccaaagagaatatatggggaatggaatgaagtgggtctgtgtcagaaccctaagaatatgctatgttacagtgggcagcagaagaggaaactggagaggatggtcacaggcataaggataattagttttttctgtttttttcgttttgtttgtttgtttgttttgtctctgcatctttgcccagatgactccacagaattttgaacataacactgtaatccagctattctcagttaagctctatttgccattgttgatctaggcctaatgccctcctgttgatgtgattcttttaagctcagaaagaagaattaattcattgaagagtatggtcaaactctttgggctattttagtatatgcctcccatgaaatacatcttactgccaggcatgtatgtgtggagttcttggcagtcatcacttggactgcaagtttgcctggtttctttacttctgccacttggggctgtaggagttttgggatgtattcatttcctagggttgccataacaaatcaccataacttaggtggcttagaacaatggaaatttattctctcatagtcctagagtctggaagtccaaaatcagagtgccatcatgataatgcttctgccaaagcctctaaacaagaatccttccttgcctcttttagcttctggtacttgctggtagtacttagtgttctttggtttctagatgcatcatctctgcctccatagttacatgacatttttcatgcatctgtgtgtcccttcacgtggcccttcaatggccttcttatcagcacactacttgttacacttagtacctaccctaatccagtatgacatcttcttaatttgattacatttgcaaagtcttttgtttccaaataaggccacattataggtattggggattagaacttcagtatatttttgggggagacacagttcaatccacgacaggggatatggtacagggagccttaatggggagaggatcttgcaacaaatctagcatgttggaaagaatggcttggagacattgagctagtatggaagtgtttaactgtaggtctttgttagagagaaatgtggtatatgagtagatagtgttagtgctcataagcctgtcaacatgataagccagacattgtctttaagtattctttggtaacaatctgtatagctattaataataataaagaataagtttaatttaacaattattaagtgccaatgctctagatacattctctttaattctcacagttactatgcaatgtacatgatactagcctcagtttaaagaggaggaaatggaaactgggaactattgagcgacttaaccaacgtcacagagctagaaatccacagaatcaggattccagcccaggtctgtctgaggccacattgtctttttacaggactagtgtcgtaaagggtttgggttaaaatccactgtgtgtatttatgcattaatagccattttcattctcaaaataatttgaaaccatttatagaaatatatatgatacaagagaacaaagattagttaacgaaatcagaattgagggaaaacaacagtaaaaaagcaagatgaagtcggggcacagttcaaatgttaagaatgcatgccataatgtccaatgtcgatagtgtagagggttgcaaatctcagggcttcctacaagcaaagagataatataatctgttaaagtatttatagcatccaaaaggccaaatgaagcaacaacaaaactaagtcttcaggagaaggaaagcttctcttggtactgagttctgggaggaatttctcctgtgggccttcaaggagggagcaccgtgagatgtcctgagcgaagaccctagtaacttctttacaggagttaccactagcacatgcatggaagggctaattcttacaacttccctctgtgtaggctgctgtctccttgccaacaggcatgcagttccttggcagacatgctgcagaggttgttggtttttctcatgttgagctacagaaaagagttcagctgctctgctggcttgggatagcatttcttcatcatggcccaaaatggggaaaagcatggtcacacatgttggcattctcaggggtgttcaatgtggaaagactgccctgacatttaaagagcccttgcctagatctgatcctgcatttcctattatatatacagaggaacttctgggaaaataatctgtagacacaactctctttaattcagtcagaactgggaaaacaaaactattctgtcagattgacccagtgtcataaacaaaaatgaagtgcatgctggatttccacattgtcagaggtttgatttgctctatctcctctagaggaatagttccagatataggaatctaaggaagcaacttgtggtctttttttttttttttttttttttgagcttgtggtcttattctgcgttgagttgactttattttctctgaaagagcttcttcataaattggatgtcttaaaattaaaaaccaggatagccttatgcctccaaatattatagctaattaaatactgggctatcctcttggaattatcaattttgcataattgagtatttttcctttaagagtagaactcaccatgtggaaagagccatatgaatggtcccagagttaaagcttctttatattcccaggagagatgtacttcaggagaaactgggattgccctatatacatccctgccagaatcactcattgctaaatgtgataatacggtttctcatggatggttccagttgttgggtcaaataattcagaaagtatctactgcatgtttattccatccatccacccacccaccatccatccatccatccatccatccatccatccatccatccatctgtttatccatcctttcatctccaaggagatgatgcctgacacaggtagtaaaaaagaatagggaaacttcatgtcctcatagtgtgtcccagtcttcaaacaataacaaaattaccaggctttataagtgctatgaaggaaataaacagggcaagaaggtaactcggggaggtgatggatgagctaagacctgaagggtgaagagcagtcaactgtgtacaaagctggaagggagcattttggacagagggaacagcaagttcacaggccctgatgggaagagctcgggatatttaagggatacaaaggagattagttgggctggagtgaagggaatggagaggttggtactaggataggttgggactggcagggcacagcaagccatgatagagttccagttttattctaagaccagttaaaacgtatgaaagagtttcaaacaagagagtggtatgatatgatgtgtgcttgaaggagatccctttgggggccttgtaggggtacagtttggagaaggggctagagtagaagcaaggaggccaggttgagggcagatatttcagtaggcctggggagagtcatggtgacctagattaaggtgggagcagtagagatggaaaaaataagactggtatgaagtaggttgttagtacgttacttagggtatatttgggttcaggttaatatctgtgatcaccaaaggcagttttccagaagtaccattgataatgtatttgattatgagatctttactgaattaacatgatagttttttggtaatcagtaaataatctcatttagcatttgatctttcactggatggccttaaactaggttagctcccttatactttagccaatgatataaataatttacttaattggtcttaggttgaggttgaggcttgaatttcccaggtttggcctgaggcttaaatttcttagagtataccctgatgtactttcctgtgtgtacatagaacaaatgcatattcctatacattatgatatttagataaaataatgtttttcatgattgatttaaaccatggataactacagtcaaatcataatggaatataatcatataattgtgaagtgaaaaaaagtgatcctaatctattatttactaaatgtagatgagagcctagagctgacaatgccaattctaatttgatttaaaaacaaaaactcagaaatgtctatctgcaccaattctccgacacaaactatacacccatgaaacagtagtgtttaacagggtgaatcaagatgtccctgctactggagtcaagcaatgctagcctttcttgtgtcacagaaaaactaaataaatgaaatgaattttctatactttaaggttgaaacatagaaaattcaaccttcagcaatatttttattaaacttttggcatctctgatggtttacttagagtagaacctagtttataatgataccttagttttagattatttagttattttatgagttagtgcctgagtctcggacttggcacacagtaattcgatttattatttttataaataatctcataatgttctgcaaaaatctcaggacttccagatgcttcagacaccagctactgtaaaaaacatccaaaattataggatggcctaaacatgatagaagcattcctcatgtgtacccagctcaaaaccagggtacttgagctgcagttgggtctcttataagcagtggtcagggacatagaccctttccctcttgtggccccgccatcttccatgtggtttcctttatcaggcttgcaggatttatctttgtcaggctggagcaaaggggcaggagcatggaggagtgtgcatgggaaggttatatggttaggcttagagggacacacaacactgtcagtcccattccattggctggaacttagtcacatggccacagctaagtgcgagggatgccaggaaatgtagtcaggtgcccaggaaggagagggaatagtttggtgaacagttagcccatctctgatctatttagaaaaacaatctagcaatcaaaatgcattgagactggtataagttagatcagggggttgggctggcataatggggcacattatagatgcccaatagagattaaaagaaaaaaaatccttctggagaggattggagttgtcagccataggcagctttctagtgatttcttttctgaaagagtagaagtactgttgaaatgaaggatttaaattcttttcaaggctacataaataagaagctaaatgattaatttgctattttttttaaaaaaaacatactttccttggaagaaatctatttggtaggatggtaccgtcatttgctttctttaaaaagcagagcccatggagcttctttctcacaggagccaacatccgcagctgatgctgaactgggcatgaagcatgcattgagcacagtgttaccggtgaatacattatttcactttatcactgacggaatgctgcaggatggacaattttatccccattttatggctgaagaaccaaggctgcaaaaagtacataacctggcaaagttcacaccgaactaaaggctgcctgattttctattaaactgttatttaagtataaaataaagggttctgagtgtctcatgtttttctttctttctttttttttttgtcaaagatgaaaatgttttacctaatagcatcactaccttaacctctcaaaaatagcttttttgagaaagacttttaaagattcctggcttctgacaaaaatgagttaaacacacttgggtcccttcttctgcctgtggagagtgagattctttccctctccatgcggtcagtttagctgctggaaactgtttatgagtccctgccgcttgacctgacttatgggacctggcaaatatgatcccagggtgtggctggaattcatttctgacttctgtggcaaaaggaggaaaaggcactaatgcccctgtgagaagaggcaagagccagggacctgccaaggtctctgcagtagacttcagggagtatctcctgacccccactgtgtggaacttggtggatcctggtggagagacaggctgtgggtagcaccagagcatcatgtgattaaaagagaggatggactgattttcagtacagcatcttgagatgaagcagtattcaaatccatttgctcaacattggctccatgaaacactaatttggctaaaagctccacaaaagaaagattttgtagctaaagaaatttagaacaccatatatatttagacttgcagcatatgttagtatatgaaaagcctacaatatcttgcagcaaggcacctgttaaactggtctaacctataatataataaacttatttgactacatacttttaaaaagatcacacttactaatatcctgaggaattaatgttttggggaacatactttgtgtatcactgatctaaatagagcatacaaagaagacaatgttagaaaagaaatccaatatccaaattaagatggaatacagggaggactacagactggaagattgcacagttactcttggttaggtaatataagcagcaacaatgatcacatcataatttcagtgttttctctgattttaaacaaaacagaaatacgaaaaactcaaatgttttatattgtaaaatgccttttgtcctctttatttttgttgtcttccccctttctctttttctattaccacataagcttcttgattttcatcaaatgagtcactgaaagttggaacaactggagaaagatgtgttcaaatccattgaacagaaagttattagttaagtacatagtgttactcaaatctgttacataaatttgttggaggctgggtgcagtggctcatgcctataatcccagcactttaggagagcgaggtgggtggatcatctgaggtcaggacttcgagaccagcctgggcaatatggtgaaaccccatctctactaaaaatacaaaaattagccggacgcggtgctgcgcgcctgtaatcccagctactcaggggcctgaggcaggaggatcgcttgaacccaggaggtggaggttgcagtgagccgggattgtgccactgcactccagcctgggtgacagagtgagactcctctcaaaaaacctccaaaaaaacaaaaaacaggccaggcatggtggctcactcctgtaatctcagcactttgggaggctgaggcaggtggagcacttgaggtcaggagttcgagaccaacctggacaacatggtgaaaactcatctctactgaaaatacaaaaattagccaggcatggtggtgcatgcctgtaattccagctactcgggaggctgaggtgggaggatcgcttgaacccaggaggcggaggttgaagtgagccgagatcgcacctctgccctcaagcctgggcaacagagtaagactccgtctcaagtaaaaataaataaataaactaattaattaatttgttgggctgataatttcatttcatgcttctttaaatttggggaacttgaagtatttggggaatttccttccctccttctcttctctccctccctctctctccctgtcttccttcctcccttccttcctatagcaaatatgtgttgatactaaggcttggcattggaactatgaaagttacagtatctcttaatgtatgtgtatatttatgtatttttatgggatgacatgtgaataatgagcattaagaaaactaaaagcatctgtattagtcactcaacaattttgctggcttttctgtagacttagacggtggcatggtacactggagagtggcagatctgtggcatgtggatgatcattctttccataatgccacggcagacatcgccaactgacgacagcactcagtcttgctctgcccataccttgctttctccagttgttccagacagatcaactggaactggagctgtttgctttcccaggagtagtggaaggattagcattttaggagaccttggttctattctaatgaagtgtttgaccttggaaaacagcctcaatgggccctattttcttcaatatttagactgggtgatttactgtattgttttaagcataacattaatgttgtttctctgtctacaaatcgctgtctggggacaaacttaatttaaagtcagcatagtcttttgcctgcctgtctgagactccctttgatttcccacttgcatttattaggggtatctgacaccttatctcactcgtttttttgtgtgtgagttaatattttaatatacttcaatttattttatttagttttagaaaaatagccttcaaaatgaaaaaaattagttttaatttcttgcctttggtgatgtaggccccctgagtttattttttctggaagtgcttcagccatgttcccagggaaactgcctcttcactcttctccaaatcctgccaggacttcttgaatggtccctacacgtggattcctcagcttctggagaagcttctgtcttaatggatgaaaaagactctgaacaacccttgcgtttttttaatgtgatactttataaaaccttttcagtttagatcttgttatggtttattatttgtggagtatcagtatttagtacagagatttcaagaaactcagtcaaaagacagtatgttttagcccaaaggcattattctcatatcagtggaatactttcttcaggaacttgtccataggattttgatatcctgagtacgtatcacagagaaagtcgtatttcccaagtgaattcctttggtcccccagaatgctgcagaactcctggttgcagcaatttagcaattcactattggtaccctcttctatacctcctaaccagttaccttgaaatctttaaaaacaaaacagataaacaaaaactcatctgtgtgctaaatccatttcaacagaaaaataatagaattattgtaattaccagctttaatcgcttgaagaacttaaaccttctggatgaatgatttctaagaatcacttcagagatgaaaggagatcatcgtttttaaacagtctgtagaacatgactttatttgtaaatggtcattcttcaaaagatattttttgagcacctgctttgtgctgggcattttgctgcatgttgagatataactgactcctagagattctttcgacttagccaccccagtaggtctgaggggactcagcctaacagtcactctctccttctgtagctgttaaaacaagcatcaagggacaaagtattgcattaaattccatgtactgaatgccattgtatagttgcatcctgaaataaccaagaaatcaactgagacctggaaatccctcatcagaaaaatgtccatgccagtcctggttgctgtaagaagacttgttctagaccagttgacatttggggagtgcgcattgtaagcaccatggtaagggatgcaaagtaccgtaagagatgtccagtgaggagaaagtagctactgtgcacaatatgacaataacaagactgggctgacaagtaagtgctctatgaattctgagatacacggaggatcccactggctggaaagaaaacaagaaggtaggagtgaagtatgaatagaagatacttgtgcacttggatcccagccctgccacttactagctgtatgaccacggatgaatttctcatcatatggaagcttctgtttctatatcagcaaaagaggaatcataacattgactcatagacacaatgataaaaatgtaaaatgcttagcacagtgtcttaaatgtggcacacagcaaatggtatcagtcacagtaaaactcagtaaataattttgcttgtttgtctataaagcagcaatactacatcataagactatggtcaagattaaataagttgggctgggcgcagtggctcatccctgtaatcccagcactttgcgaggccaaggcaggtggatcatgagatcaggagttcaagaccatcctggccaagatggtgaaaccccgtctctactaaaaatacaaaaaaaaaaaaaaaaaaaaattagccggggtgtggtggctcacgcctgtaatcccagcactttgggaggccgaggctggcggatcacgaggtcaggagatcgagaccatcctggctaacacggtgaaaccccgtctctactaaaattacaaaaaattagccgggcgtggtggcgggtgcctgtaatcccagctacttgggaggctgaggcagagaattgcttaaatccaggaggcggaagttgcagtgagctgagatcaagccactgcactccagcctgggtgacagagtgagactccgtctcaaaaaaaaaaaaaagattaaataagttgacataattaaagggtctggcacagtgcctaccatacagaatatgaacatatacaataaatattggctattgtgatgatgaaaaatgggggtagatgagaggagacatttcagacacaggcaagaggtacatagcctggtatgggcttggcaaattacctggttctctaggatggaagttttgttcaagtgagtagtagttgaaagatagatgatggttgtaaaatatgttaaacatgaattaaaagcctcttaattggggatattaaataaagagtctaggattccagaagaaaatttaaatgagtgatctctaagtttccttctgtttgagattctgtggttcctccaagacttccagtggttcccaagaaaaacttgtgagtcaaccatcccactgcagtagcgatccagagctgcagcctggaacacaccagcaataaggcaatgcttctctgttttgataacagcacctcatttgctaaatgaaaaagagttttagtttccatgtggcaatctgcccaggcatttgatttgacagctaagagagagaaaggtaaaagcccatgcgtgtaattggtgacacgttatttcctggtcatttttttccccttagttttgagagccagagtcaaagagaaggaagagagagggggaaaaaatggctctacgggaaatgagtttccaggcagagctgagacacctgaagaatgtgtcacttcatatactttgcacgtgtgagtcaataggcagtttcagggtttgccaaagtgcatccaagggctggtgcaagagaagaaaccactccaggagaattaatataattctggtaagacagcttcatgcattaagctttcaagagggcctgagaggtctgtggacttcatgcagaactgtttgcacagcattggccagagttggaatataagctagtacagcattcccaacttcttcctaaatttattttatgtgaaaatacatttagaaaactcagagttaagcaagtcaaagagatttctttactgcagaacatctcaggatctttgttatgctaatatgaattgtgagtgtccaagaaggagagtgtgaatgcagtacttcccacattcacgggaaagtggtaggttttaatgtagaatgtatctagggactagagtcttaagcagccctttgggaaaagctgatttggggcaggaacaccaggccgtcattccttcactcttgccctttcccggggaggtctaggtacggacacagatgtttgcaggcagccctgtcattctagcagctgaatgcaggacattgtccaggagaacaccagtcatttgcaaaaacatgatgcggtatggtaggtaaaataatagctccccaaagatgtccacattctcatccataaagcctgtgaatatgttatcttacatgccaaaagaaattttgtgtatgcgattacactaaagatattgagatgggtgattgttctggattatcagggtgggccaagtgtagccacagggtccttatgagaaggaggcaggcaagcgagagtctgaggagatgcaatgacagaagcagaggtcagagtgatgtggggccacaagtcaaggaatgcaggcagcctccagaagctagaaaaggcaaggaagtggattctccctgagaacctccagcagtaacacagccttgccacccattttagactcctgacctccaaactgtaaaatcaccttatgatgtttgaagccactaagtttgtggtaatgtgttacagtaggggtgggaaatgaataatgaggtttgatattggtcccacttttcctgtgcttgaatgtggatggattgacatgcttccagaccccttctaaggccctgctcctgttcaggactctgatagtcaaggaggtcatccataaccaccctctggctagtgtgccctgctttcttgctgtccttcctttatctccccaagccccagggccaagtatcactctactgctcagatgtgcagtgaccaggccagtcactgacagtctttgaaagaagtgatgtgattggccactggttgtgctatgcatctgtcatttttgtagtgtgggctgaagagcatacttcattcagttactactataatatcttgtggtaactgaaatttgaacagggttgttgtaggatgggtgtcatttaaattgtgctcactgaaatgggtgcatatcagaaccacacaaaatgaggactgcatcttttaaaatcatggtgcaaatcctgcagtagcattgttatcactggactgggggacaggcagcctagccatgtcctcttgtgtttgctgaataccaacgtataaatgtggctgatgcaagcattagggatgtcagtaaataatgtatgaatttaaagttgagcaaaagatgatgaagcactatttgtactttgtgtctgatggtcacagttcagttatccaggaatctcactctgagaccctgtgatttgcaagtaggaggttcattagggactgcttatggccacaaggactggcaggggaatgaaagcaggagaacggaacagagggagaagatggctgtgatgcacagggggctctggagccgggacagcctgaagagtggtcccgagttaaggcaagggggcaaggcctttatgtttctccatcagccagtcattggctgtgggttgcccaatcccaagagggcaaactccctccagggcggtggctctctctaactaagcatgcttctttgagaggccctcagctgaaagctgccagcctctaacactcccaactgggagaataaatgccctagtcctaaaggaatctgatggcacattacagggtccactaccctgattattctatgattctggtgccactggacagccaaactttacagagggctaatcagtattttagcaaggttcaagtcagaatctggggcagagtatgcaggaagaagagacaggagcgcaggagagctgactgaggctgctgctgacggagaaggcagggccgccttctaggacagtggccacctctccttcccaaagaacagcagccagttggggctggatccgcctccactttgattttcatttatggtaacttattaatttgcgagaagttgatggtctcgttactttatcttatcttgcccttttcgggcatttgggctctgaattggagcagatggagaggacaagaacttgaaatgaaaagttactacatttgacattcgtggtcaatttttcctctagtgaaatataggtaccatgtaaaggcaaattgaaattttttcaactcccagtccttccctttccctccttttttcttctggttcttagacctcacacgtgtgtcatgttcttcctccagtctagtcacccctagctctttatttgaggagaattagatgcctgaagtccggctcctgcttcactgaattgggaaacaatgaagtcagcatctctcattctctgaactaacacttacagctttgggaaactacctctttcccccaagaaaaagggtctgcagatctctgagagaggttgctaagaattcagcagggagatgaacaggataatagaggactttgtcacaaagggctgacaccatgttttagaattgctgatcttaacacttaggctaaaacctggataaaaagagattcctgcctactttcctgtgacattctctttagaaagactgaagatactcccatctgtaagaatttagtttgggcatcctggtggattgagggcttggaggccacatgacaaaagcttttcatctggaggaccaagtctgacccttcagtagtggctgcctggagaggctgtgttaagaaagattctgaagccagaaaagcttctgtctccttagctgatggctgccctggccgtgttcctggggaggaaagggacacctgatgtgtacttggccatctcaggacattagtcttcacacaacagtcctcagttggctgatgggtgtttttgtgcttaaacactatatccaatgcatacctttaatctggtttggggtatactgtagtttgtgagttattcagaggtaaaatgctaagtacaggatgacaagttgaagaggtagctgtccagtccctagacttcacagaaagagtgaaagataaattaaatcctaaaataagtatatgaatagggaagaggtatttggaattagtattaagtattatttggtttgatattgtgtgggagacctagatcaatgactccaggtcctaaagtgctggacctgaggatataaagattgctgtggttttgaaatggagaattcgctcattgtctcttttgatctgaaaacaggcagtgaagtatgtaagtagagcatgcagcactatgcttagcaaatcatgactagaaactggagatctgtcacatttgtagggagaaggatcgtgtatatatggaagaaataagagaggcaaattgatggcaaaaaaagggaaggacaaacagggtcagattctagtctttgccctttttgttgagagtgagtgtttttttcctgaaagagcatcaaggactacacaggtaaaacttgaactgtaatatttaaaattccttttgcctaataacttctcttttttttgtcaagtaaacaaaagtctaccctaacagtttcgattccctactttcccttgctggaagtacattaaattgctcatgtagatccctatctcacaaatagcacttttttttttttttttgagacagagtctcactctgtcgcccagactacggtgcagtggggcgatcttggctcactgcaacctacacctcctgggttcaagtgattcacttgcctcacccatcaacccatcatttacattagttatttatcccaatgctatccttccccccaccccccaccccatgacaggccctggtgtgtgatgttcctctccctgtgtccaagtgttttcattgttcagttcccatctatgagtgagaacatgcagtgtttggctttctgtccttgtggtagtttgctcagaatgatggttgccagcttcctccatgtccctgcaaaggacatgaactcatcctttttttggctgcatagtattccatggtatgtatgtgccacattttcttaatccagtctatcattgatgggcatttgagttggttccaagtctttgttattgtgaatagtgccgcaataaacatacgtgtgcatgtgtctttatagtagcatgatttattatcctttgggtatacacccagtaatgggatcgctgggtaaaatggtatttctagctctagatccttgaggaatcaccacactgtcttccacaattgttgaactagtttaaactcccaccaacagtgtaatagcattcctatttctccacatcctctccagcatctgttgtttcctgactttttaatgttcgtcattctaactagtgtgagatggtatctcattgtggttttgatttgcagttctctaatgaccagtgatgatgaggtttttttttcatatgtttgttggtcgcataaatgtcttcttttgagaagtgtctgttcatatcctttgcccactttttgatggggttgtttgtttttttcttgtaaatttgtttaagttctttgtagattctgaatattaaccctttgtcagatgggtagattgcaaaaattttctcccattctgtaggttgcctgttcactctgatggtagtttcttttgctgtgcagaagctctttagtttaattagatcccatttgacagttttggtttttgttgccattgcttttggtgttttagtcatgaagtccttgcccatgcctatgtcccgaatggtattgcctaggttttcttctagggtttttatggttttaggtctaatgtttaagtctttaatccatcttgaattaatttttgtataaggtgtaaggaagggatccagtttcagctttctacatacggctagcgagttttcccagtaccatttattaaataggtaatcctttccccatttcttgtttttgtcaggtttgtcaaagatcagatggttgtagatttgtggtgttatttctgaggcgtctgttctgttccattggtctatatctctgttttggtatcagtactatgctgttttggttactgtagccttttgtctaagtgaggacacttgtttgtgctttctataatttggacagcatgataaggtagttttacgaaggaattttgcatttctcacaagacactttatatatctataagtcacagggttctccccaccccccaacccagcacagggaatttgaaactaaataaggaagaaactaaataaggtgaaccagactcaattcaagtgaatttcagttctaggtttctgctatacacactttaatggtgatttttaaccattatttataagttattgatagttctgaggtctagtcaaaccttccacagcatttaaccacaagatgcatttaagttagatgtaaaaaccagaaatctaacttgagaccgactttgtataagactaattgaaaggttgattgtagatggaaaattcataaacatttagtgatagctgtagatttcatttcaacataacacaatggcaaaattataattctaatttacattaatttataagaatgttctgaaagttgcaaacaatatctagaaaaagtgattgtcccaaagttcagatccttcagtattagatacattgtttttctgtactagtgcagaaaaaaaaaccaaaagccattcatttcctgctgtgacttgtccttcagaaggtgggatagttgcatggaatgactcatttccttcacaaactagaagttgccattctaacgagaaatggcagtgtggaaagcgaattagtaaatgttaaagtatgagtcctaggtaatgggacctgttcattaatttggacagtgctgtgaatatgtgagttactcattttgaaatatacattgaattagatatgattaatattccagttgttaaaaacagataaagatgtcttaacctgacatatttcctttccatgagttttaaataagaacctgagatcattttactgggactattatagaagtaatttgtttacgtgatgactctgttcatgaacctaataagcttgctttcttggtcattttttagagaaggtttttatttgattgttgaatcataaagagacaggactcttgcattccagcttcatcctctggcttttctgtgatttttccttgttcctcagtctcttcatacataaaagaaatacatcagcagtggctctgagatgcaaaaataaatataattgtcaatatttaaattgtaaaactttagtagattattcttattttaattaaaggaggaaaatagacccaaaatgattttaggagctgattcagataaattggtcaggtggtttagaatttaaattcatggttcttttctactgaatttattggataataatttatgcatatacagataaatttggtgcactttaaaatgtgcttaaaaaatcttgtgttaagatcctcttcttcctgaatcagaggtccacaggcctattttggcccacagagatgttttgtttgctcatagaaagtgttgatttttcttttaagttatcaacctataaaaatacagatttcacctaaaaaatagatttccaattacgcttaaagaatcataagatccagcaatgtcaggtctttatctctacatagcaactgctgctagtactgaataactttcccctttcaatggtgcatgtgcctcagcaccaacagtctctgggatgagaccccagtactacaaatcagggttttctctgttgacctagatgagaacattctgacattgagaataaacagtttaagcatcattattaagtggtatttgaattcagagattaggcacatgaacaaaacctagggtactgctaccttgaacttcttttagtaagaagcaagttcttctaactttcctctactttcttttaagtttgtccaaaggtgcatttgcaaagggattacaaagaccatggcagaaccagcccacccctccctaacacacacatcacacgcttattccaccagctcctctaattaaaggtctcgcacagctcatacgactcccaaagccaattaaacaatgctcacccttgtacctcacagtaggttggggagtagcttggaaaacgctgtgattgatatgaaaagtagtaacgtatttttaagcacttttagcactgttgttactctatgaggcacaagctttcaacatagtggccttttattttctgcgcttttggagtgtgagaacaccatagaggctacacgcaccacggcgtttctgtgggctgggaatcaaggcctggagaagggggtgggcagccgggaagtgacagtgcagggagggggagttggcagctgtcaaatgaatgcatttccctcttctattatcctgctatccgaatgctccatctattcatattcatggtttccatcactgtgcatagcaccaaggccagcttccttttcacatttcatcttcttgtctttcttggagtttcattttgatttactaaaaatcagtggactgcttctaaacaaggatcagctaatagaaactggaggtagttggtagagaatctactgggaggaatttatttacatacaagaagttaaagccaaatgtatgtggtaagttaactttttgttcatccattgttaatttcattaatttcctactaatctagtgattaattccccatgtaggaagactatattcacattgctaagagaaaggaataagtaaaacattttatattttaattacaaagtaatatatatttaatttagaacatataaaactacaaaaatttaggaaagtacagaaaagaaattaaaatcacctgaaactagacataattattagtaagttctgagtttatttctttacagtcaaatatgtatatatattttttaggaaattgtgataattctagaaattattctcattgtcttcttatatttgtataatactaaatcataaatattttaatatccttaaatattttattaaagcttttcatatgtctatatagaattctatagtatggatactccatgatttttgggaagttaggtttttctgaatttaaatattaaacaatgttgtgataaagacattcacaagctttcacatccaagctttgtggaaatctatgctttttccttaggaaaatttcccagaagtgatttgtgagtcaaaaggtagttggcctttaaagtaacctccacaaagtttgtaggaattgaagctctctgatgtataagagccccaaacagggagcttttctaagaatatctttctgggaagctactcagaatattctttgactgcttttgtctagatatttttactctatgaagaagactaatcacttgctggagtttcttggaatataggaagaggagaatggaatgctgccaactttgaaaatgtttgggaaaagtgtgggccatattaaccatcgttttaattaacatttgttttagatcaagaatggaaaaccaactcttctggaggaaaacataaatgtctgctggggaacatgtatttgctttgggaacccttgggaccaagaaaataaaatgcttaataacaacagcataatgaggctgtaggagtgctgaaagcattaattaatgaacaattttaaagttcttcagaagcccagggagagtttagagtggatggattcctttactgacaaagactaatatgttggactgcttaggctgacttgattaaaccagagctaaattttaaaacacacctaattacagtttccctattttaaatggaatgcctcatatttattggagtcctattattctattgagatgaaccacggttaaccacatccatattttttaatatttaggctgtagaactaaacttttacatgtacctggagaagtttagaagttgacattatactgtccttacatgtgacgtcccactttgcaacaaaagagccataggaaggcaggccctgaactgaccaatcgaataacctgagagtctgatcagaagaatgcatgctatgtaaatagatcacgtttgggcaagtgcttcctattgctgtccattgaaacttaacactttcagtggtccttctgagtttaacaggtttctatctcctggcaataaaaccagactttgctatagtggtttacttggcaaacttaatctccacttgttcctgcagtaggattaagcatgtaaacacagcatgagttaattgtaaaaatggacactgatgtgacaactcagttggaatacttgctgtattttgtcatacaagtaatgagagtttttttgctcgtttttagtgatattgcttacagaacctttaaagtgattagcatagagagataacgcttctatgtgccttagaagagaatctatgctaattataacagtatgctgccagcatgattgttttgtaaatgatgttgtcctagtgatatgctgggaactgtacttactgttcctccaggataggagatgtcccttgagaaaagggagttctgggtctttcttttgtgtgttacagtaaagggaactcttgaaactttatctttctaaagtgaatgtccaggattaatctttcctgatagttctcttgcctggatatcaaacaataaagcacttaatactctcaatactggtaatatatgaagttagtccagtaattcggaaacaggaagtttgaacccatttagactttaatacactaaccaacagtcatttcccttaatttcattcattacatgaatttcatacattcatggattcattactttcttcatttgtttacacatagcctgaattgagtgtctgaattgaattcagcagtcccttggggccatcaggatgggttccttgtcttcaaggagctcccagcctagtggaacaggcatgggaaaactaatacagtgtggcacgagctatggtggaaatgtccctcaggcatgcaggaacagggatggagtagctaaccctgcctcacggtccctcctgactccctcagctccattcatttaattaattaatttatttatttatttatctatttatttatttattttggagacagggtctcactctgtcaccaggctggagtgtggtggtacaatcatggcttactgcagccttgacttccagggctcaagtgatccttctgcctcagcctgctgaatagctgagactgtaggtgtatgccactgtgcccagctgatttttaaaaatcacttgtagagacaaggtctcaccaggttgcccaggctggtcttgaactcctgggctcaagtgatcctcccacctcagcctcctaaagtgctggaattacactgtgagccaccttgcctggcccattttattttaatatatagcagtttttcccaagaaccttgccactctgattgtggcccacagactagcagcatcagcatcaccagcagttcactacacatgcatcacctgaaccagacctgttgaatcataatttgcattttaacaagatcttcaggatccaaaatttgtcacatgaccacaactcttatgtggaatagggggaggggtggcactgttacaaatgtatgttcttggcagggcatggtggctcacgcctgtaatcccagcacttagggaggccaaggtgggtagatcacaagatcaggagttcgagaccagcctggccaaaatggtgaaaccccgtctctattaaaaatgcaaaaattagccaggtttggtggtgcgtgcctgtagtcccagctactcaggaggctgaggcagaagaatcacttaaacccagagggcggaggttgcagtgagccaagatcgcgccactgcactccagtattggggaatctgccctgatattcacgtaggttcttttctattttccttaagcatcggccagcttgagaaataaagggacagagtacaaaagagagaaattttaaagctgggcatccaagggagacatcacatgtcggtagggtccatgatgccccacaagccgcaaaaaccagcaagtttttattagggattttcaaaaggggagggagtgtgcaaataggtgtgggtcacagacatcaagtactttacaaggcaatagaatatcacaaggcaagtggaggcagggcgagatcataggaccacaggaccagggtgaaattaaaattgctaatgaagtttcgggcaccattgtcattgataacatcttatcaggagacagggttttgagatcaaccggtctgaccaaaatttattaggcaggaatttcctcttcctaataagcctgggagcactatgggagactggggtctatttcacccctgcagtctcaaccataagagacaggtgcacctgggtgggggctgtttataagcctatacctccaggtgcgtattctttttcccagggatgttccatgctgagaaaaataattcagcgatatttctcccatttgcttttgaaagaagagaaaaatggctctgttctgcccggctcaccggtggtcagagtttaaggttatctctcttttttcctaaacattgctgttatcctgttcttttttcaaggtgcccagatttcgtattgctcaaacacacatgctgtacaatttgtgcaattaatgcaattattacagggtcctgaggcgatatacatcctcctcggctgacaggattaagagattaaagtaaagacaggcataggaaatcacaagggtattgattggggaagtgacaagtgtccatgaaattttttttttttgagatggagtctcgctcagtcgcccaggctggaatgcagtggcgggatctcagctcactgcaaccttcacctcccaggttcacgccattctcctgcctcagcctcccgagtagctgggactacaggcacccactacgatgcctggctaattttcttgtatttttagtagagacagggtttcaccatgttagccaggatggtctcgatcttctgacctcgtgatcctcccgtctcggcctcccaaagtgctgggattacaggtgtgagccaccacgaccagcctgaaatctttacaatttatgtttagagattgcagtaaagacaggcataagaaattataaaagtattaatttggggaactaataaatgtccatgaaatcttcacaatccacgttcttctgtcatggcttcagccggtccctccgtttggggtccctgacttcccacaacactccagcctgggtgacagagcaagattctgtctcaaaaaaccaaacaaaacaaaaaatcccaaatgtatgttcttacatacattgagcagagtgagcccactcttgatcaaggtgtactggaatgatttagtaataatagcttcctttattatgtgtctattgcttgccaagtgtggctgctaagtagcttagtatatgatcttactcatttccttctacagcctgtaagataggaatacttatccccattttgcaccctagaaatcagacgttcatagaagttaagggatatgtccaggccacacagcaaataatagctgaaccagaatttaaatgcaggattgctttgttccaaagcgttgccctttcccctgcagtacccacacagactcccaaacattggagacatatccctgaaagcatgcttcatacttagtttctttttatctgtcagcttcatgacagaaagttagtacattaaacccaaatagctctaaaactggagttaattaccttctgctccagatgcaattagtaattgctgtaaacctgctagcatgatgcctggcagttatcagttcccagatgcagttttggtaaatggttaaatcctattggtctgctaatttatggtgctagatgctagatgaatttcatttctgaaaacctttaggtagacctcatcttgagagtcacttgggcagcatttcgctggcagactacctgtttgatacctgggcctatttctttgctgtggaatacattttgctcagggaatgcttggtaaatccattctttagtgttttaaaaaatctttattcttagggtttatttttcttgtcaagttttttctatttaatcttttctattcaattaaaggaaaattgtgacattttatgatcattataatgagtgtgaaccttatgcagatatatgaagaaaaaagttaatctcttccgtaatcccccttcatttttaccccacagtgggaaccagcatccacaaattggctcatatttttccacaactttctccttcctcatacaaacaggcacaaacagcaatgtgcaaataccctgcaatttgctcttaagatgtcatggacatccctctctactctcaaatctcatttgcaaaattctttcttcttcactacaaggattctcaatttgagcagcgaagtgagtaaactactttccatttaggtatctcagacaagactttaaaagagatatgcctataaaagtagtgatatcaaataaaggtgcttagaacataggcaaattcctatattgatttttgttgttgttgttgttgagacagagtcttgctctgtcgcccaggctggagtgcagtggtgcgatctcggctcactgcaagctccgccttcctggttcacgccattctcctgcctcagcctcccaagtagctgggactacaggcgcctgccaccacgcccagctaattttttgtatttttagtagagatggggtttcaccatgttagccaggatggtctcaatctcctgaccttgtgatctgcctgctcggcctcccaaagtgctgggattacaggcatgagccaccgtgcccaaccacctatattgatttttaaggaattatctttctaatttagaatatggaaaaagaatggttgatacagatatatgtctttttttaatctctgaaaataaaaagtttgaccattttttggacagaaaatagacttattatggcaaattcaacatgggccccaaaatgctgtaacagtacactgcacactcatttctccttgtcggtggctgtgctctcttgcacaacttcaaagcctcccatcatctgtggagaaaacttttttttcttagtgaatagcatgaatacacttcctttttctctttttctaaccttctggcttatgtggaacttgtgccaaattcctcatcatgaaggcatctgatttatattttgacaacagtgatagcttcaaatgaacagttgtaaataatatgtcttcttctttttagttatggattgcatattaattttaaccaaactacataattatctcatcgttccgaagaaataatatatacaaaggaggatttttttaaagtatgagacactaggaccgtttgttgcaattattatcactattattatcatcttcctctgtcctggtatcctttattttctgaattaaaaaaaaaaaaggctgtatgatgtgctatctagggctttgataaatactctttttattctggtaggtgtcattgttgttacatttctccttcgaatttgcttttctgggctttcctcagaccctcttttaagctacccattgtgcctacagcatcgatggtatttattatgttaaaaatgattctagtttcacgtggctacattttattggtgctaaaagcatcaaggtccagtgtaaagagcactggagtgagagtcaagaaacctaattaggtgggctttggagttgttttgctgtaggaccttacggcaagtcaaggaacccatctggacctcctctcccactccttactcccagctcctgagccaccctaggttcctccccaagagaacaggtgctttcacactacatgtctttgcacatgctgtttccactgcttcaaatgccctttcttgtctcctaccagacaaattcctattcatctttaaatggcccacattcaaatctcatctcctgtgggaaactcttcttgagtccctctctcaaacactattagttgcttcttaatctgcaaggaatctcataattccacaaacacacataataatacttttaatattttattgcaggggtgtgagtgtgtgtgtctgtgtctaatctctctcactaaaccatgagcacctttaggacaagaactgtgtctcattcatctttttctccccagggtctagaacttcgcctgatacgtggtaggtcctctatacctgttggctcactgaaggcatgagccttagttcacccatctgtagtagggggattggaccatatgctgttaaagtaatgctatggaattctatgtttttacagagagctcgaacaagaggcccagccaggtgatgctttgtgtgtgcaatgcagaggggaagtgtgttgatggattgaaatttggctgcatcaccatttcaaaacagtgggcaaaagaggcacattggctcttttgaactttaagtagctgtcctaatatcttgtttcaccaccttaaagaatatttactatatatgtgaatgaatccataaacaatataaagtcaagtttaatagttgttttgttttttagcttatgtgactgttttagagatacatttgtgttaataacataagaagttagtttgtgtattcttgtataggtggacattacttggcatatgataatgagccttagtgccctgttggaccaaaaaaaaaaaaagattatttccttatctggtgtgatgtttccctctaggggcctgtttccagccaggaaaatttgtgcttctacttgtagctccagtgccctggaagctacctccaacccccatcacccacatacgtggttagcctttatcttccgattagggaaatttatgcctcaccacctccatcacaggcagcattgtataccagcaacatagcctttctctctttccatagtgagagaaattagcttagtgaatttttggaaaatttcaaggcaagtgtggcttgagctcaagatgagggagttaactcccaccatacttgtttttgactgaagtctattttactgctttttaagagtgagagctcaggattagcagctgctgggtataagtctaaggtctgacagaagcctttgcagagacacctgctgctttcaggactgcctgggactgagggaatcccccacacaaaaggcttctgttggatttctatgtgtagttgagaatgcttaaatgacaagggaagaaaaccacaagtgaaagggaaagacggactaggagaagtaaatggaaatacggttgacaaaaggctatgccagtgcaaaaagtgagtatgaagcaccagcgaaaagctggaaagcaaactcaaaatggctaggaagaagaccaggcggcagtatccacattttctaaaactaccgtgggagccatgattatctaaaatccccgctagatattatcacttgaaacatcatgtctcactcttttagtctgtgtaagttaccagtccttccagaataagtaggaacaattctgagcccctggcatgtaatggtatagccctatgccagtcaatttgtcagccctggcacaacataagtgaatacaggcagccttgaaatgtgtacgttatgtaagctgcactttctcctttctgtgctgaccacattccatagtgttctagataagcaaaggggcatcctgtttggttgtcagtgctactcgatgggtatgccatgacccctttagagatgtgacaccaggcagggcgcagtggctcacacctgtaatcccagcactttggcaggcggagatgggtagaccacgtaaggtcaggagttcgagaccagcctggccaatgtggtgaaaccctgtctctactaaaaatacaaaagttagccgagtgtggtggcgcttgcctgtaatcccagctactcaggaggctgaggcaggagaattgtttgaacctgggaggcagaggctgcagtaagccaagattgcaccactgcactccagcctgggcaacagagcgagacaccatctcaaaaataaataaataaatataaaaagagagatgtgataccaatcttggatctctgtgtaaaacattatgtttgcagtgtaccttgatatccactggggtgaatgttgtgctgagttgggtgatatggttggagttctgagttaccgttacccttgctgctactacagcagttttcacaagttagagctaaatgcaagaaaagtctctctgtattctgcctgatgctgtccctcctctgcctcccatggatacaacataataggaaacagctagttgtttgcagacttccagctgcaggggaaacacagagaaatgtagtagggcaggtttgaggctgaaacagcagataaataatcatcatgatggtcacctgactcaaggggagccagtctgcatactggcagacctagggactggcctgccttgaaaatccctgtccattcagggacacattgtcccaataggttatttctctcagaagtttggttttggaagtaaagattatcagacagtcagaagtgaaatctacaaggatgcacacaaaagaccatgagcaagaccaagttaagagaaggcagaagccatgatgatagcatagcagaatcaataagcagagaagagaccatagcatcagggtgagaaagatgtacatgaagaatctatggaaatagttgagtcattttaatggcatacgcaaaagtgaaaaatcttcgaactcttgcttctaagggtcaggtggccaagcagcccctaaggagcagcttagaatagaaagctactagatcagctggaaaggaaataatgaacccaaatgtacctatctagtttattactcgtggtacatcaggcagcatgagcattatgtctgcatcatcagttctccctggccccccaggtctcatggaggtgatggggatgtgggcctaggtggatactgtgcacataggggtctgtttcacagctgagcaacactgagctttagaaaaccccaattttataaggagacatgcctatcctcccctccagagacggctgattccagggtaataaagcttattaccctggaatgtaaaccgatctctgggcaggggatgttctctgtctttactatgctagtcaggaaacacatgtgccttctgatctgcaggggaacactatctttagtttcctaggctgtttgctatgcaaatatcccagaaaatatagtctggcatgacttatagaaacgttatggagaattgcctcccaacgctaagaattatttatttattttatttatttatttatttatttttgagacagaatcttactgtgttgcccaggctggagtgcaatggtgagaccttggctcactgcaaccttcacctcccaggttcaagtgattctcgttcctcagcctcctgagtagctggaattacagacatgtgacaccacacccagctaatttttgtatttttagtagaggtgaggtttcaccatgttggccaggctggtcttgaacccctggcctcaagtgatccatctgcctcagcctcccaaagtgctggcattacaagcgtgagccaccacgcccagccccaacactaagcattcttaagctgccttgagtctttccactttatacatggccaagtcctgttttaactcctgtttagattcatatgaacctcatattttctttattcccattaaattcttaaagcaccacttctccccacagtcacactagcctgggtggatttctgcttctcatctctagaaggccagagctaactaacataaagctggaaaattagattgtaatcagaatgcgggcccttgaatgccaggtgaaagttttaatcgaatatgaaaccctgacacttggatgccacaggactagctttagttaggcttgatccacttatgcgtctgttcatttgggatgtgattactcaagacacaggaagttattctattcattgcctccataatgctttgaagggtgcttcaaatttgagccagaggcagaagtgatcaattttctatcctattaattgtttggatttcttgttccagatcttcttcttaaaagtcttaatagatttcatcaaatgaaactttagataggtattggcttacaggtttacacacaggtcttctcacttaccggtcctcctgcgttggaagttcttcatactctttgacttgcttctaatactgccaccctgaatccttctagtctctgtgcacaagtatcttcatcaaagaggcattcctggtccaccatcgaaactagctcttgcccgttgtcctgtcttgtggcacttgctcttttcattcttggcacacagcacaatttgtaattgtacatcatgtatgtgtgtttaatggcttctcccccaacagactgtaagctccactaagagaagagttatatctttcattcattacagaaaacccagcctagtgtaccaagtgctcaagaaatattgattgaacaaattatagatttttgactctctttgtaaaaagtcttgaatagttcagctcagtgagtttgcacttatgtggttagcaatagtgttggtgagttttatacatacaggacttaacatcattagatagtgttttgtttctgccatttttttcctattacaaaaggaatataatctcaatgcctttaactcaataaacacagaagagaacaagggggaaaaattgatatcatggtaattctgctgttgacattttgtagagctgtgttttaaagaagagtaattttccatgagggtagagagggaagagaatgtaggatgtaaaatcagtttgagatggtccacacaaaagtcgatatgaaagtgaaatgtaaagcaggagccattggagtgcaaagaaaggggctaatattggagacattccagagacagaatcagtgagatttgcccaaggcaatgctgacatttggggctttgtgattgggagacagatgtagctcttaacagaaatagtggtgttggagaggccttgagtcctagaaaggaaataggctttagagccagcagaggtgggtttcagttctggttctgcaagcaagtcacctaacctcagtgaacccatttccttcctgtgtaaaatgagctccacagtccctaccttgccaggttgttgttgggtaagttacttaacctttctcagcttctttatctgttaagataggaataataacagtacttacctcatgggttgtttcgaggattaaatgagttaatattgtagaataagtgatatatagaagtatttgctatgatccttgttgttattgatatattatcaatatatggactggatgcccttgagacatccagctgaaactgtccatctggccacgcaaaacacttgtctcgaacttggatccgtggtctgtttaaaaatactggcaaggccaattttccggggtggttcatgtgttgtcagggttaaaggctgggagtcaagtttccattaactgaggtataatggtcactgtactccatgtcccagagtccccttctaaagtggatacctcaacctgactgtgtggatgtagtttactagctggtaccctggtgagctcatgcctgggtttgacagcctgcagaaaaagcctgaggatgcatggaacgctgagttctcagggcagggtagaggaggccgggggtcggggggttgatttgtgcaagcaccaaacccacagggcaggtgcaaggctcaggaggtgggcagacatgaaatgcacaggaacaagcaaacagaagggaattatcctgggactgctattcatgaagcctttatggtggccctttaatgtggataggttaaagtgactcgaaggttgaaggctaacaaaatattttcaaattctttatgctttttatttaaagtaaaaataaatgaaaaataatgcacttcagtttgctctcttcttactgcctcccactcatcagttttgcacagggagaaatgtccacttgccatggcttcttactcccgcctgagttttttgttttgtttttagcatagacccattataactgaaagcaaacagcccaccttctcaaccccctacatggcagacagggggctgctgtggaaatgctgggagaccttgttagatcagtgtcttctgtgatggctgtttattatctcttcccgtttttctctgagttaatgggatcctctgaatgggagcccttagaaagactcctgatcacttctatgttcaactcaccctcagctccagacaactgtgataggacctgcattttgagaagagcatatattatgaaatgcaggtaacaattctcacttggggcatccctgcccctcaaagatgcaggaagaacttggcctgaaccccaatgcttggcatcataagctcgttatgggccctcaccctgccctggcactccttagtggctctgtcacctggactcaaacccttatcccctacaagaaatccagtggaaagcagcattttccagagtctgtagcttttttgaagatttcattcatgaagggcgagcagcagcaaatggaccactcagctgtgacacaccctctgccatttccccctacgtcgcttcacatcctattaataccagctctctttgcaccctcctgctgtacatgggaccaggtcttttaagattttctgaggccttagttcctcttctgcccacgagcataccaaacataacaacgtgcacccacacctcacattaaatataatctgtgcagcaagcgatgaaaagcacctttataattgggcctttgaaatcatttgactgtaagtatgtcattcaatttatgattagctctgttttctcaggagctatgcagtcaagaattcttaaaaagaaagtcagcttaacttactaattgttttcatgcacaagaaaatatttttaaaatattttgaaacaaaatgttattgaaatttgttagatttaacaatgaaagaagtaccatatattggccgggcgcggtggctcacgcctgtaatcccagcactttgggaggccgaggcgggcggatcacaaagtcaggagatcaagatcattctggctaacacggtgaaaccccgtttctattaaaaatacaaaaaattagccaggtgtggcagcgggcgcctgtagtcccagctactcgggaggctgaggcgggagaatggcgtgaacccgggaggcggagcttgcagtgagccaagatggcgccactacactccagcctgggcgacagagcaagactccgtctcaaaaaaaaaaaaaaaaaaaaaaaaagtaccgtatatttgtagacatttacttaaacatttggtaattgtcatgtttatctctttgtattttggaaacaattatctcttttaagccctcaaatatgtatgtgcacctcttaaagatattaaactgcaagcgctgtagctatgttttccagtggataagacaggttagcaggaggcctgttcaaggcaagatactctaggaaaagagtccagtccttatcctggcttcatttctctccagaagcagccttatcaggccaacccattttccccatgtgccttctgatgaatacaattttctttgtctcattacacaaatttttgcagagtacaaccaaacttaaaaacggccatgtggtgcattccttatacagggattttgtcaggaacctcaagcaacttttagagaatgcttcacttggaaagggtttggtgggaagtacagatggggagataaagacatctgggcaggccaccagcacgggcaatggtgtagaggcagaggttgagatgcaactgagccaggtctgaaaagccttggaagccacactgaacatttgagaccttacctcatagtaaggtctatggggaagaactgacattccaggaactggctcaaagagtaacttaaggtgaatgttgtggatttttcttttcctttctcttcttcctcctctccattcttttaggcacagagcattccttttaacattgccgtttttcttaatagctagataagcccaggtatccagtaagcccccaaaggagacttggtgtaagcagacctggtggaacaaacatccagaccatccagacattattatgagttttgagtggccagtggggctccatgtgctttatgtttggattatttaatgtttttcccgtcctttaatgttaggtctcttcagccaaatgataaggttgaacagggcggaaattacagggtggggatcacagtggcgttttagcataagccttcgcttccattcatgtttcagtggtttgaaagagttgtttttttattccacccttttgctttatgtttttttgtttttgcattttatttaccgtgcttttcgttcatttgtttcatcttatctcttttcttccctccactggatcaatagcattttatttccttttttcagtgtttgctttttaaaaaaaaattcatggctgatgtttaaaattctgatttcccataaaactccgagttcccaggtttttgaaagttaacatatgtgacattggactgtattcccacatggcaacgatctgtaagaactaccttccttaggctgggcgcggtggctcacgcctgtaatccttgcactttgggaggccgaggcgggcagatcatgaggtcaggagatcgagaccatcctggctaacacagtgaaaccccatctctactaaaaatacaaaaaattagctgggcatggtggcgggcgcctgtagtcccagctacttgggaggctgaggcaggagagtggcataaacctgggaggcggagcttgcagtgagccgagatcacgccactgtactcctgcactccagcctgggcgacagagctagactccgtctcaaaaaaaaaaaaaaacaaaaaaaacaaaaaaaaaaaaactaccttccttagacaggtacacgcttaccagtttaccccaggcgccaccacactctattgtctccctgaccctgaggagacatcagttgtggttatttgggttgttgctttcctacacctggctgtttactcagttatgtgacctactctgccccagtaagcatttcagtttgccatcatcttttagctggagcatttagttgatttacatttgttataattaactgtaccgatatattttagtccatatctgctggagtcttttgtgctgtttgttgcacagtttctatgtttcttctcgccttttttgtctttttatggatgagcgagttcattgtctcactctgttttttcttctgcaccactctgaaaggcatactgttttattctttcagagattagcctagtaattatagcatgcgtctttaacttactaaattctaaagtgatcaatagttttaccttcctttgaataacacccttcttatttatccctccccgcaattcttacactagtcttttgagtattttaagtctatataatttttcaaactccacaaggcatcgtttcttttattcttttatagagtcagtgcttgtattgatttacttatatatttatcattttctgttctcttaattctttcttatattcttacatccttaaaattccttctttttttcatattttgtctgtatatgtctcatttgagtattctttttccccctttcctttcttctactactttagaagttatacaattctgcctaggcacggtggctcacgcctgtaatcccagcactttggaaggcccaggcaggcagatcaagagatcaagaccatcctggccaacatggtgaaaccctgtctctactaaaaatacaaaaattagctggggccaggcacggtggctcacatctgtaatcctagcactttgggaggctgaggcagtcggatcacaaggtcaggagatcaagaccatcctggctaacattgtgaaaccccgtctctactaaaaaatgcaaaaaattagccgagcatggtggcgggtgcctgtagtcccagctactccggaggctgaggcaggagaatggcgtgaacccaggaggcggagcttgcagtgagccgagatcgcgtcactgcactccagcctgggtgacagagcgagactccgtctcaaaaaaaaaaaaaaatagctgggcatggtggcatgtgcctgtagtcccagttacttgagagactgaggcaggaggcagaggttgcagttgcagtgagccgagattgcgccacactccagcctgggcaacagagtgagactctgtctcaaagaaaaaaaaaagttatgcattctatttcttctctcccatttccttcctcatttcccctgaaaatattatatgaataatatgaatgcttagccttttttttttttttttaaagagacagtatcttgctctgttgcccaggctgaagtgcagtagtgcagtcatagctcactgttaccttgaattcctgggctaaagcaattctcctgcctcagcttctcaagtagctaggactatagatacgtaccaccacatccagctaatttttaaaactttttgtagagactaggtctcactatgttgcccaggctggccttaaactcctggcctgaagcaaacctcctgccttggcctcccaaagcacgagcttagcttttaaaaagttttaagttattcaaaatttctattcccctatcacgtaatgcaagggccatagagtactttaagttaatcactctttcatattattgctatctgatgttttagtttcaagttgtttataatgcctttccctattaatcttaaaaattttttttgagtaggggtgtttataaatatactaacatgtttgtcttctttgcttatcattgcttatttatctttttcttagtttccttcatatcgaagttattattctttaatatttctttcagcaagggtctatgaattggatagtctctcttttttggtatgaatatgtttttatttcaccctctgtttgaatatgtctcctaaaattcatgtgctagaaacttaatcctcaatgcatcagtgttgagaggtgggaagtttaagaggtgattaggtcctgaaggttctgccctcatgaatggattaatgccattatcatgggagtaagttcattgtagtaggagtgggtttgttattaaaggaaggggtttcttataaaggatgagtttagcctccttccctctctctctcttgcccatatgatgccttctgccatgatgtgacagtagttgctggtgccttgctcttggacttcccagcctccagacctgtgaggaaataaatttctgttctgtgtaaattagtctgtgttattctgttatagcagcgtaaaacaggttaaaatacccccatttttgagcagcaacttaattaggtatagaatattagtttgacaggtttttttattaccactttgaatgtcatttcattatcatctggcctctgtattattgatgaaaagtccaccaccaatctaattgccattattaagtttgtaatttatctttttctctctggttgcttgtatgactttctctttggtgctagtgttctgccatttaccgctgtgtgtgtgtgtgtgtgtgtgtgtgtgtgtgtgtgtgtgtgtctttttaatcctgcttgggacttgtaattttctaaatcaagaacatatgtattgctttaatgctattaaattctcagcttttatcatttcagtattgccactctcacataacctactccttctccagaacttcaattaaatgtgttttatttccccaatttactctctgtgtttataacctctctttcacattttttgatcccttttttctttctctgctccattcagaacacttctttagacccatctttcatgatggtaattctcttttcagctgtatctaatatgcaatttaacatgtttttctcatctttaagaattcaaattagttctttttttcaaagttgccctttgttcataaaggatggttcttttattatggtttttattccttcttttatgttaaaaaaaacttttaaacgtaattagcttatagatcctgtcagattattctcttactgtaagttcttagaggtgctaattcttctgctcattgtgtacgtggcttctccttctgactggcttcattctttgtgggtttattcagcaggaattgtttattctgagggagtcttgtaggtcctgagttatgaaaatatttctacagaacaatttgagtttgcttcttccctggttctgggaacatttttatagtgatctattagttcaagatacttacacagcctaaacaatgtaaatttgtgcaacacacttgtgcatgacataggcttggtgttctatttagtttttttaatcggatgcattttttttcaccctgatactggagcacaattcagacttacttcccccttccctgagctacttggagcagtggtagttcttctagtcctgtttttatgtaaatggatattttgaagaattctgacttgatgcagttatgtcagttccagcatcttaccttgcatgagccttgggccatgtcacctgttctcaaatgggcatcccagccctaaacccctaagcagctgtatccagattcaacacccctctgggtgatagcagtatttgctctcattcttattggtttagctttggattctggcttcatttctggcctgcattaagaagaacagttatgtcttacaggtatatgaggtacattcttgtgatggctgccatggcttatattttggaactgaaagaggatctgggtaaattcagactgacatttttaatgtaaattaattcactcacaaaccatttattggccacctatcatgttcctgactttgtcataggtgctggggcacaacaataaataacactgtgtctttgctcctgtatagtttacattctcatgggaaagacaaaacaaacaataagtaaaacatatagtaaaatcagctggagcgatgaagaaaattaaagcaggagaatgggagagagagggactggtttgggtcatgtgctttattagggtggcaaaggaaacctctctgaggagtgacctttgagcacaggcttacatgcagtaatgaagaatcatgctggtatctggggtgtgagtccgttttctccaagaagcattacgccaaggcaggattggctatgcaagagatttattaaggcaactcctgtgagcaagagtgaggtcaaggaaacaatgaaaatgtggggctccttgttcaaaataacattaagaattccaagatggctgcagaggagtattcaaccaagcacagagcccttttgaatgccctgtctgactatgagggaaagtaggagtgagctgctgggagctcgggagactcctctgattgtgatgcaggtctgaccccaggtgaagaagacgggagggaggagggtgagcggaagcatcctacagggctgtgctgtttcaagagagcctggatctcttggaggagtctttgagtccaagccacctcttaggtaagttttcatctcccaggaataggtttgcatcactatgcctgccatgctcagtcactatctaggagtagcctgtgagaaatgtggcttcagcacaaatgcagagatggatttcagagcacagcagctgtaactcctagccagtaatactccttgtaagttggatgtctacaaggcatagtctcatggcagccacactgggtaaagagcttttcaggaagaggggacagtgattgcaaaggcagttgttttggggttgaattatgttccccatcccaaattcatatgtagaattcctaacctgcaataccttttaacatgaccttatttgaaaacagggttattgcagaaaataatcagttaacatgaggtcatactggagtcgggtgggcctctaatctaaaatgactgctatcctcataaaaagggaaaatttggagatagacatacacacaggaaggataacttgtgaagatgaaggtagagattgaggtgctgagtctacaagccaaggaacactgaagataccaaaaaaccccaccagaaacaaagacggaaacatgaaacagatttctccctagtgccttcagagaaagcattgcccagccaacaccttgatttcagatttcttgtctccaaaactgagacagtacatttctattctttaagccacctagttttgagtactttgttatggcaggcctagcaaactaatacagccttgaagtgatagaagacttggcatgttgtagaaacatcagggaggccactgtggatagagcagataagtaagggagagaatcgtaggggaaggagaggtatccaggggccagatctgtagatcatgactttgtaaaccaatatagcaacatttgtttttattctgagtgtgatgggaagccattgtagggcttgaagagggcagtggcctgatttcacttatatctttaaagtaccactctggctcctgtctggaaataatagtttgccgaggagcagaagtggaggcagtgcaaccagcccagtcaatggcagctgtaaagagagagaatctggtggtgtggacaagagtagttgtggtggagggtgtgaggagtttgggatgtgttggcaatttgaagtaaatgatatactttcaaattgattagacagagcaactagactactagaattgttttctgaaatgagaacactgggtgaggagcttatctggagtttacaggaatggatgtcgatatctgccattttttaaaagtcacatgttgttttgcaatttgctttttgattttcatgaacttcttttcatatcaatacagatatattgacctccctgtgttttgagggctgcccaatatttcttatgtggatatgccattcttgattatactagttatcaatgaatggacttttggttgtttccttttgtatgtgattataaacaatgaggcttaaacagctgtatgatttatctattgcttcataacagaatcccctccaatgcagtggtttaaaaacaacaacgtttattatctcgcagtttttttgggtcagcaggcagagtacagcgtagctgggttctccggttcaggatctctcccaaggctgaggctgcagctgtatcaaggtttgactgggaaggagccgcctcggagcttactcagtggtcattggcaggattcagatcctggtgaactgttggcctgagggcctttgctcctcactggctggcttttagctggaaggcaccttcagttccttgctatgtgggcctctcaggaggagagctcacaacatggcagctggcatcatcaaagcgagagcaagagtgtgtgagcaagagaggtcacagtgttttataagctaatctcagaagagtgccccatcccttttgctgtattctgttcactagaagtcagtctctgggtccagccttcactcaatcagagcattatacaaaagcatggatgccaggagacagagatcactaggagccaccttagaaatctgcctggcaccataacccaatacatttgtgttttgatagattgttaaaggtgggtttgctgagggaaaaagtacgcatgttttaacatttcatatataacagtggatttcttttcaaaatcttcattctagatttcaaagtttgttttgatgagactatttgctactgcctgagaaggagaggctatagctcctcaaagagcctttccagattttgtcatgaatgtctcttcccttcttgcccttctttttctcacccctccaaaacttccagaacaggaagtagctatgtgtcttgcaacaggaatgatacgaaggttctaatcagcaggcacatgcatcatggtgactattctagggtatgatgacctggattatgccattaaaaaatgtcattgccttcacttgtgtgctgacatgggtaaggtttattcagccagccttgatgagaggaattaaaaagtaatctctggtataaggagtcagtttgggcccatgatgtctagggaagttccacttgaataatttcttctaaatcctcagaactcatgagcttctgggaggtcatacagtaatgaggtatacatttatttccttattagtcagaaagaaactttacttaaaaggacccatttgtgtttactagatatggttggaggaaatataaattattatcactattactttatctccttcccatacaaggctttataaaattaaatgcattgtaaacctagactataataaaaatgagatcgtgtaaatatctgtgtgtcttacaggctacctgtaacaagataccttagactgggtggcttataaacaacagaaaatctatttctcatagttctggaagctggaaatccaatatcagggtaccagcatgattgggttctggtgtgggccctcttgagggtagaaagctttctggggtcccttttataatggctaatctcattcattagggtagagccctcataaccaaactatcttccaaaggtcccaccttttaatgccatcacattggaggttagaatttgaacacatgtagtctattgcactgtggctgctatcaggttagatgccccatttgaaagattagactgtcttggcagcttcccaaatgaatgccaaggtgccttctttccccttctgcttgtgagcaaggtggggtgtgtgtggaactggggagagtgcatgacctctgatgaagctgagggaatgtcttgatggggtccatcaccaacatcccctgtttggggctgacctcttggttggagaaggtgctagattccttcccacactgccccttgctttctattgtcaggtccctgtgttgccccagaggcccatggccctccttgatgtggattagtttagcgactagctctcagggcaacaggtccctctctgcttgtccagcttggacagcttctctttcctgggcaccgtgaaggccaggatcctgcctcctgcctgtgccctcctgtgagcctggtgctctaggagcgtggctctccaaacagggagtgactcctctgtgtcccagcacgaccccaccctccccctttgcctccctcagacactgggcagattgtactcacatttcacaagattactccgctagatgagaaaaacgtgtactttattcaggacagcgagctcagctctctggattgcattccttgcagaaatgagaatccaagtgtagtggcctttcaaagctgaaataaatcagggctccttggccatactacccttgtctgtcagtttttgtctttttctagaagccatgcaaggttagggaaaattaagggagagcaaatgaggaccagttcattgtgtaatcacttaaaatctctgagttggaatagctatctgtgatttaaaacataaatgtttgcaaatggtttgtatcttgatcagttatgtaaagacgtgcatttgagatgcaccaaagtgacttttagatgcttctttttaaaaatgacagtcttaacttgtgtttgcggaactctgtatttttcagttttcacctacgttaagcctttcaatttttttgttgactaaagttggtagaagaaatgattatcagagtttttatggaatcctccaccacctttttccaaaaggaattagaatcatctggtgcttatataaaatcaaacactgtttaaactcagggagctctttttttttttttttttttttttttttagaataaagtgcagtttaaagagaatagagtgggagcttttaccagatacctgttttggtctcttgctgggctgatactattttcctaggaatggtgactgtgtgtttctgtttttcctcttcagatttcttagaccaaatagaggaaatccactggaggcttacctaacaagacgtattgatgaatgtagaatcttaaatgaaaaagaagtcagtggatgtggcttcctgtactgtcagcttggaccaaaaataaagcgagccctcgccgcaggggtttggctcagccctgcgcctgtggcagatgttgttttccatggctttgcttgaggagtacacttctctgggcaaaagttcctgaggcctttggagacttttaaagccttttttttttctgtagcttttattgtttttaagaaaagtggtgtcacccttacttgtcattaaaaaaaaaatagtgtgggaaaaacaaataaactacccaaagaataaaacaagaaaaaccaaaacaactcccctaaatgaatgaaaaaatttacacccttcactcttttgcaagataactatttccatgcaagttggattagaaactatgagaagatttttctctttgatttttggtttcttctatttttaacatttttgacaagtctacacattgtggttacataaaaacatcaggattaagatatttggtatttaaaaagcacccttggactcgggatgattctttctggcctacagtgtgccagacccgctgctaacctctcttcacctactgtcttagttgatcaccacaatcctgcaaggtataacccactaagagtgttttaggagagagggaacgtagcagcctgtgggatctgcttttcaggagttccctatccagaaggagggagacatatgtatatgagtaagttcaagaaagcatgatgttagtgataagaattaaagctaatgcatattacaaacttaccttgcgcttgctgctatatcaaatgctttatttggataatgtaatttaactctcatggcagccctttgagatggatattttatctccattttacagaaatggaagaagaggaagctaacgttgagcaatgtgatatagtaagctccagagcccacactctagaaatggtagatttgggagtcaaaatcgggcagtctgatctcagatccatttacttaacgaccagtctatacaacacagtgaccaagagccacaaagcgcaggggtggttcattgaactagcctctccacaggtggtgtagaccagtaggggcagggccatgttgtatattcccaataatgattcaggttaattctcctttcccccaaggactttttctgccattcttactgctggaaatacaactcttcagatgaccacttttgtctcctgcctattcgcctcaggaaatgacttttggcccatggaccactggatatgccaggccaggcatgtcagactccctggctcagggagctcttaaatcctggagagcagcagagtccacacatccactggtgaggggtgggatgctagagtctgcattttaaacttgcaccccaggtgcaagtgatcttggtctttctgccatttccgagtgtccccaggaaacccagagggaacttactagttagtccgtggacagatggttcagggtgagaaggggttgtattttttccttcagcagccaccaccttctaccagagccgccagagctcaaaaggggaaaagtgaaagagaaaaaaacaaacaaacaaaagataaaaggccagggggaggcagtgctgggggaagagtatagaactcaataagaacaagtcaaacccataaatatttgctgagaaaagcaagggttccaaatgagtgcggcagggatggcagaaacaaagccagattagggaagggtcaggagagaaggggaaggggtaggctgaacctccaccagaggtggcagcttgtgtttgaagcctgctttgatgggcccacagggctaacagatgggtgggtgggccctgattatagatgggccagaagttgggggtgagctgtgagaataaccaacaaatcggactgtttagatacaaaggaagggctacagattcagagctttggagcaaaggagagacaagagtcacttcctaacagcactgtagggagaagtcgcctggaggctggaggattatggcaggcggaaggcaaaagaaagggcaggggcagggatttagccactgacaagtgcagtcagcattaggggtctggggagttgtccgattgatcaagcgaaacctgaaagttctcagaggtgtttcagtggctgttgagaggagtagacaccctgcttcagctgcagaagagataaataatttttatttatttttataaaattgagggcctgcataaaacttcatttggaggaacaaaggagctatgttgctttaaaaggcttaaaaatcaccaggaatatgaataatatctatatctacatctctccatagatctaaaaagacagttaagttggggtagttttcttttcttttttttttttttcttttaagagacagggtctcactctgtgcccatgctggaatgcagtgacatgattatagttcattgtggcctcgaactcctaggctcatgtgatcctcctcctgcctcagcctcccagatagctgggaccataggtgtgtgccaccgtgccaggctaattttgttttgttttgttttgcagagatggctgggggagggggaaggtgttgctttgttgcccaggctggtctctaattcctggcttcaagcgatcctcctgccttggcttcccaaagtgctgaaattctaggtgtcagctaccacgcctggcacgaaaagggaggggggaagttttgaagggccattaagtgtcagacttgctgaagtattaaacagatccattgcctagtggaaagaacacaggcactgaggttgaggctttgttttcagccccaggtctgtcctaactgtgaacctttaaatattcacttcagttttctgggcactagctgtttgtttttgtttttaataaattaagaggctctattgaattaactgatgttcagaagttcttcctgctgtacaatcctgtcagccatgaccttgctatcaggcctccctagcagatgcacacggaatgggtagcaggatcaaagttcgaggaaaattaatgtcgtggtgttgtgtgggatgattgagggagacaggttaggggccaggatgctgtcactgaagggtacaaaggcaacaagagtggatgcaacagagacagaagcttgggcatggacaccaaagtcacagaagttgagttttcactaaaggaggtgagatgatacattttttttctcgtattagaaaaaaaattcccagccaggcactgtgactcatccctgtaatcccagcatctagggaggctgaggcaggaggactgcttgagcccaggatttcaagaccagcctgggcaacatggcaagacccccatctctacaaaaaaagaaaaattcccaagttgattagcttgctctcttccccattattttttcctctgaggtatatttttaaaacttattttttaaacaaagcacaaaggtaaaggtctttgcgtggtattgcaaagatctttacaaagttctaccatgactttttaaacattgttttaagccagtgggcatgcttccaaaggagctgacttttcactgaatgctagaaaatgaaaacatgggagctgtttagattggcctgggaaacatcatgtccagtagccactgttgatctttgcatgaagtagttctgttttctgaaaagattccttttgtccattgtctcattatgattatgggggcctagtcctctcaactggagaaagaactgtttatctgtgcggtatttgattaacaatcatttagatacacagtttaaccacaaaaagttactgagttcctgtttctgctgggtcctgtgttaggtaccagggatgcagtgaagtctagggtgtgctcccaaccctcataaactgatggaggggccagacatgtgagcaaagaaatacagcacagtatgtggtcctggggcattcgcatcagagatgtgcatgcaaggtgcacacgatgaccagccatcccgtccttcttgctccttcttttggtaccttgttccctctgctttaccaggagttgaagttaagccagagagaagtttgaggaaatcgaggctgggcaagggagaggccttatctgagtggatagaaagtttttcagttccctggagaaagcttctgataatcatgttcccagacagtagccacatacaggggcatgggactgtcaggcctaaagctcactgtcaattgtggaggattcagaagcacttcatagatgatgggggactctgttctgagcagtctgtctctgtgtgtctgccactgagcagtaactggtacaaatgcaccctatgactaggttttctttcttagctgagaaatctcttgagaaggctatgcatttctggtgtgtagacagactttctgcagatgagtaagttatgtcttaaacagagttcttgttgaactaatgtcacgaagagtctctgctaacaaaaacagctaactttgcatagccaagccactctgcacaacttaacaatgttagttctccaatagagccctaataaacaagtcacaccactcttccctatgtggcttcaaagaagttgatagtaacaatacaacaacaaaaacaaaaatcaactttgtttcttatggaagccagactgttaaccaatgggcctgttaactctaaactctggatttgcccaccctttcccatgtagcactggtgagagcagaccaattccattcataaaggcagaaagctggggaagcagcaggtagcacacttgaaagcaggcacttcgcaggaggaaaaaaggtcaggctgagccagctgagcatgtgcggtttgccaactaagtgaatccatccctccacttgccctggggcgatgttagtaaaaggacatagagaggatagtaggatgcatagggaaaattcttcctcatccaaaccacgagtggggaaatggtgcttccctctgaggtgcctcaagattttacactttttgagggtcatgtgcttaggtcttgtggggaagaagtcaaagaaagagcacattatggttgggactcctattgatcatcacaccacctgaaatctgatcataggagaaatccagattaataaatttaacacttgacatttacctatctttacttatattatctcacttatccccaaaacccactgtgatattggtattagcaccctaacaacaaagaaagaaattaaagcacaaagagaaagcatttagcccacaagggtaactggtcaaggggcagagtctggactcagacctgcatctttctggctctaaaggtagacctcttttcagtctttgaggaggatacatggtttgcaattacatgtctgactcaatttcatttcaaactttttttttaacttgttattggcatgtttgagagaatagagtgggtagaatcattaattatttgtctcaattttatctcagggttacctgctttgtgtacctgtttttcatgtagaaaaatgagaaatcatctagctagatggttgtctgttctctcttgagagtttctagaaatgcagacttaatccttctggcaggatctctggattctgataacaggaatgataacaggaatgatatggtttggctgtgtccccacccaaatctcaacttgaattttatctcccaaaattcccacatattgtaggacggacccaaggggagataattgaatcataagggccggtctttcccgtgctattcttgtgatagtgaataagtctcacgagatctgatgggtttatcaggggtttctgcttttgcttcttcctcattttctcttgctgctgccgtataagaagtgccttctgcctcccactatgattctgaggcctccccaaccatgtggaactctaagtccaattaaaccccttttttcttcccagttttgggtatgtttttatcagcagcatgaaaatggacaaatatagtaaattggtaccagtagagtgaggcgttgctgaaaagatacccgaaaatgtggaagtgactttggaactgggtaacaggcagaggttggaacaatgtgaagggttcagaagacaggaaaatgtgggaaagtttggaacctcctaaagacttgttgaatggctttgacaaaaatgctgatagtgatgtgaacaataaggtccaggctgaagtggtctcagatggagatgaggaacttgttgggaactggagcaaaggtgactcttgttatattttagcaaagagactggtggccctagagatttgtggaactttgaacttgagagagatgatttagggtaactggcggaagaaatttctaagcagcaaagctttcagaaggtaacttgggtgctgttaaatgcattctgttttaaaagagaaacagagcgtaaaagttcagaaaatttgcagcctgacgatgcagtagaaaagaaaaacccattttttgaggagaaattcaagtcggctgcataaggagcaaggagcctaatgttaatccctaagaccatggggaaaatgtctccaggccatgtcagagatcttcatggctgccccacccatcacaggcccagaggcccagcaggaaaaagtggttttgtgggccggtcccaggatccccgtgctgtatgcagcctaggaacttggtgccctgtgtcccagccattccagctgtggccgaaagggccaacgtagagctcagggtgtggcttcagagggtggaagccccaggccttggcagtttccacgtggtgttgagcctgtgggtgcacagaagtcaagaattgaggtttggaaacctccccctagatttcagaagatgtgtggacatgcctggatacccaggcaaaagtttgctgcaggggcgggaccctcatggagaacctccgctagggcagtgcagaagggaaatgtggggttggagcccccacacagagtccctactggggcactgcttggtggagctgtaagaagagggccatcgtcttccagaccccagaatggtagatccactgacagcttgcactgtgcacctggaaaagccacacacacttaatgccagcccatgaaagcagccagcagggaggctgtaccctgcaaagccacaggggtggagcttcccaaaataatgggaacccacttcttgcagcagcatgacctggatgtcagacctggagtcaaaggagatcattttggagctttaaaatttgactgccctgctggatttcggacttgcatgggccctgtaacccctttgttttggccaatttctcccatttggaacagctgtatttacccaatacctgtacgcacattgtgtctaggaattaactagcttgctgttgactttgcaggcttataggtggaagggacttgccttgtctcagatgagactttggactatggacttttgggttaatgctgaaatgagttaagactttgggtgactgttgggaaggcatgattggttttgaaatgtgaggtcgtgagatttggaggggccaggggcagaatgatatggtttggctgtgtccccacccaaatctcaacttgaattatatctcccagagttctcacatgctatggcagggacccagggggagataattgaatcatgggggccagtctttcccatgctattctcgtgatagtgaataagtctcacgagatctgatgggtttatcaggggtctctttttttgcttcttcctcatttttctcttgctgctgccatgtaagaagtgtcttccacctcccgccatgattctgaggcctccccagccatgtggaactgtaagtccaattaaacctctttttgttcccattttcaggtatgtctttatcagcagcatgaaaatgagctaatataaaaaataactttttaaacagtttagaaagtcatttctgttatcagaatacagaggttgtaactggattataaccaggaatgtaatgtgttaaatgtagagtatttatatgctattctgaaaagtgtttgagggattagtgggagggcatggtggatataatttgcccaaattcatgaaataagccatattgcattagatttattatatgcaaaaaaatactggaactccctcaaaatattagggtaagtgtgttataaatgttggggaatattgttaactcattatcaaatcactgaggttaatattatttctttttgcctgagaattagaagtccacccaaattaagcaagaatgaagcattttctttctttctttcctcctatgcagggcttccattgccaccgtgccccccacccctaccacctcctgcctatttcttattcgtaaacacacatttgcattgaactgaatcattttctgtttctcacatcatttcttgatattaagtcaaaagtcatagtttcttttatcagtcactatgtcaataaccatataattgttttccatttgtgaagcactttcactggcaatatctcttctaattttcacagtaaccttacaataaaggtaagcaccattaaccgttatccttattatttttttcttttttcttttttttgagacagggtctcatgctgctgcccaggctggagcacggtggtgcaatcatggctcactgcagtctggacatccccaggctcaggtgatcctcccacctcagcctcccaagtagctgggactacaggcgtgtcccactgggctaatttttgtattttttgtagagatgaggttttgccatgttgcctaggctggtctcgaactcctgggctcaagcaatcagcctggctcagcttcccaaagtgttaggattacagacgtgagtcactgtgcccagccaccatcatctttaaagaagacaaaactgagattcataaaaagtgtctgttcaaagacatagccagctaaagtcattgccagaatttgaatccaggtcttttgaatctagaccgcgaagtttccagaaatagatctcttctggagtggcacatgacaatgtacatagggctaggtctctgtttctcccatttcctccctgacccccttaggtgtaccccagaacttcctctgttttgttttttttctttaactacccaactgtctaaagaggcacttttaagtaggtggtaagaggtttggagtcagcttggctacttactggttctgtgatcaggatatagcttcaatctcactgtgtctcagtttccttaagcgtaaattaggtataataataataatacctattcataaggttgtgaaaactaaaataaataggaagtccttaataaataccattgttaatattatataattagaattttaggcatcctaagatagattctaggtgactggtctctcaagaatctgactctctagtaaaacttgtatcataatatgattcaaatgatgaacatgatgatagcaacaaccactatactatattcagtacttgctaatgctaagtgttttacgtaaactgtttgaattcttgcagcaaccctgcaaaagctgtgtgctgttagccactgggctttagtgcctcttaatcttgcctgctcttggtgttaattttacctatcccctgtcaaacttaaacttatgatcttttgaaaattcaaactgtattttcgaatttccagtcttcttgcccattttgtgttctccaccttcctgcaaagatcttttgcaatggttccagatgtcatacataagttctcatggtgctagggctagaaatttttcagactttgagactcaagttcacttagtggctaagagtaaacaagtctgttgtcagttacaggatccaacttccttgaatttgaacctttttcctttaagacttttccaagaaaggattgacatacgctgtttcaaagaaaaagaaagggtaactgacaatgacctttatcccagtatccactgaaggttcagagtgatatcatatcagctgatatacacccatgctttataaagtaaaaatacttatctcaatatccgttcaaggttcagagtgacatcatatcagctgatatacactcatgctttaaaaagtaaaaatacttacattttttacctgccttaattttttatttcagctataacttaagctttatctgtagttctcatcccatcccccattcttctaccctcacctgacttagatattgtttttttcaattcacgtgtctttctttaagccacaaaaatgaatattttccagctagtctaaatatctggaaataatataccaaatctctcactgacttagagaagtttctctttcttttaaaaaaaatcagtataatcagtaggatgtcattataagatttataatctttataagattaaataggtcatctgagcttttatcctgtaataattttactttactatttatttttacaactgcagtaagattggatcaaccctgcccaaggtttgaccaaaaggtcttcatctttgtcattgttgggaatctaagctagttggtactggtgtccagaaggaacattattctctttatttcagaaaacattttttaaaactctgtcttttgttccatggactgtcagtaggtaatgtttcaaaccataccaaacaaatcccactcttttcttttactctttccattctttctcaccactaagtgtcctcttctgaatgatgatgaatcattataggtttttgctgaaaacacctgtgcattcatctattgtagctgttgctgctgctacagtgtataaggttacaggtaatgctttcattttggcactatttacttacacatttgatgctagaatgtctgcactgatgaccaaaacaataagcctgtgaaacagcaagaatgcaattcaaacgaccattgaagagctagaagatgagcagaatagtcctgtgacagacttctgtacggttacacctatttgtactaacttcatctgtgttcagaaataatgtgagcattctaagctctgaaaccatgcatatctttgaagattaaaatgaggcagcaaggtttctcccaactaatgtaacaaaatgcagtgatatgacagctcaaagttgaggagttgaattcgttggggaaaaaaatagcaaagctgcttctcaggcaggaatctcttccattctggggttgtcctgtgggcaaagatggcacctactaagtaggcataaggtaaacagtgcataagggctgatggaattgcatcttaggcacatcctttattggatcctggaaaggtcagacgatgttcattttatgatacacacatacatacacccctctaaaataaaaacccaatctactttaattcaatatttgggaagtgggaggacgattccaaggactattccagctataaagagaacaatatagtgggaaaatgagaaatcagactggtcattctttgattctgaagaggtggaatttcagataacacagaggaatggagcagctcatttgaaagaaaagttgagctgaagtcttgtcctttcaggaggcagacttgttacttcagggtatcccagcggcctcagtgagttggcagtgagcttacagattgacatagagtccccaaataactgaagacaggagatccactttggttcctcttttgtggtttcactgtgatgtaaaatgttcgtaattcactgtcatttactcattcattcagcaaacattcagttaagtcagctctgtgcctggcaatgaagatgacactaaacctccttcatgcggggtgtttctggggcatttctcttatggccttcctataggaaatgaatcatcctggcagctgatcctgccaggaggagtcctccacctcacagataagatattgaactgcctttcctgcaactggtatcagcttcagtccctctcctttcctaaccccctcacccttcagtaccaccaaggtctcttagaggtgggcctggctagagaagatggatctctcaggagtgactgggagagttgttttatttcttccttatccctggcaaggactctttgatttctcaactaatgaggcaaaagacatcaataggaaaagaaaaattagaactttccttgccagtgcgttgcttagctaccttgtcaacattcccttgcagcccagccgaattctctctgcatgtttttatagtgcacatgttttattgttataattgatctattaggcagaaaatatggagagcacatggaacttctgtcagttttgtgctatttatttagatttctgtttttctctttccaaagacctcaccctttattgtcctgtttcatccctgacctaagtaatactctgaaggagtcacatcagtatgcatgttggtgcattgaactttatagtattaaaagcaaaagtcaataactaacctcaaaactacataccaaattgtgaattcttcatagacagggaccacatttttatgaactctatgtccttagtgcctagccctgtgtctgacacataaaaagcttttagtaaatgtttattgatcaaatgaaccattggtttcaaatatttattaacaaccagaattgtcatgggtgcagttcatgacatagaatttactttccatttctacttagaaggaaaactttatgacttttttttttttttttttttttggagactgaaacaggacagaaaataaccactgtgttgttgctagtgctacagtttattcagccaaagaaacctttctgcttgaggccgcaatagcagcagctgccctctacctggcatttatgaaaaggtattcactggagacctcctaggtgctgggtgctgggctatacaagtcagtccagatcaaaagacctggtcattgtcaccatctgtcaaggcgattgtattcaaaacagtatctctcatttttttttctcgaacatacccacactcaactgaagactgtttatgaaacaatctgttgacaaaacaataaatggaagtttgtttattcattcctttactcagccaggcaggcagccctccaacccagcacttctcagatcatatacttttgagattttgttaaaatgcacacttagatctaccaggtttggggtgaagcctgagagtctacatttctaacaagatcacttagttagatcaggccttgatgctttgagtgtcatccatggaccagtagattcagtaccacctgggagactgttagaccagcctaatcagaacctgcattttaacaagatccctgagttcacattggctaagcactgttctaactatttgattagcccacagcataaattatgggcaggggtcccaagggggctctgggctgggaaagtaagtccaggtgcatttacagttccctttttaatttcaaaactctcaggtacctgcgccaatatggcatctcacactcaggaaaagacacagatgggtgcctctttgttctgtcgttcagtggcatgatacatctgttattatccatcctggattgccattgtctttaaacatgggggggggcctacctgatcaacctatttcttcttaagaaagcttcattttagattcaaaagtttgacctaaagagacagcctcatgtctgaccatgtcagaatcatttacaaatttgaatcaagcactaggagatctgagtctctgtttccttgtctgtaaaatggagataataccacctgtccttccagttcaagagactggtatcaggccagagcgggaggattgcttgaggtcaggagttcaagaccagcctaggcaacaaagtgagaccatgtctctacaaaatacaagataaaatacttagccaggcattgtggcatgcacctacggtccctggtacttagaaggctgagacaggaggatcgtttgaacctgggaggtcgaggctgcagtgagccatgatcacaccacaccactccagcagtggcatgatcatggctcactgcagcctcgacctcccaggttcaggtgatcttcctgtctcaaaaaaaaaaaaaaaacatatcttcaaatttgttatatgagtatctctagaagaaaaattcccaaatttccaacagtgttttaatatttatttaaatatttgcgagtgccagtccacgcaaggctttatgatgaggaggatttgttgtgattattcggtgttattcacatgctcccgtcagaggtgtcagaggggtttgttgatggcatccacaagagcctggcacaggtgcggaggaaggtttccacaatggtgtccatgcaagcagacactcctggctgagggaaaacagaaggattagtggcaccaagggtatgtatggccatgaaagaaagttgctctgaggactgtgggcattgatggtaccctcattatcagattaatagaagagcaagtctcatttgttcaagacatgagggggcagctgtttggtggttactgttttactgtcagcaattaagcatttgagacatagaaggactattgtctgtttttttaaaaaacaagtcctcaccaccctttctctgtatttccaaccttcagctcattcttttattttggaaatttccttctaaaaccctcaggtttcttaagcctgttttcaggcaagctaagtctcttttaggaaggtattctttaggaaaagagatcactccattctttccctagactttgcagagtttctgtgttgatatccttacaggtgctattccagggtacccagaagtgtgatttcacagactgtctcaggcagaaagtttcatgtgacctgcttttccacatggatctctttggtggggagtgggtcaaaggtcaatgtcctgtgaataggaaaaaaaaaacccaccttgcggatatggcatttcagtgaaaacctgttaggaagagggtggggttaagagggaggaagtgagcaggcagagagccagaggccttgggactgggggtggggcggggattccaccgcctggttagcaattctgagcgaagagcagagttgataagggggaatcaggatgtcttaggtatattggcctcaataacttaaggttgaaagtaccatcaagccctgtttgagtgtggaatggcagaaccccttacaggcagggaaaaaacagttagtgggatcatgctccaagcccattttaacagattccgtgttgggctcttctgaatctggccacagctgttggctcattttgttggggcttgacctatgagtggatcagttatctcctctctatttcaaggccacggaacatagccttcacctccgaccaatctatacagcagtctttggggaatatgtggatagaagctttggggaaaacaagctttgtaaaccagtaggaaagacaagtcgaagtccattacttttgggaatatatggccatgtagagaaagcatttgctaggagtcaacaaactggatttcaatctaacagcatgctccagctagctatgggatcttgttaggcaagtaattgtatctcttggagacccaggaagaatgatacccactataaatctattagacctattataaatctataaacctcagcagattttcgtgaggatcaacaagttagtggagaagagggcatcgaagacttcagagctgtgccatccagtgtggtagctgtgagcacctatttaagtttaaattcattaaaattaaataaaatgtagaattctgttcctcagtcacattagccacatttcaaatgctcaatagccacatgtggctagtgtgtaccatattcaacaccatagatataacacatttgcattatcacggaaacagaaagttctattggacagttctgcctcaaagtgctgtctaaagtgtgagatgaagggtataaaggacggcacattggaaggtgacaaatactgtcatagttaggaatgtttggcaagaaacagaaccaactcaagttagctgaaatacagtaaggctttgactaattcaggaaatgtgaatggatcccaaaaggcatgaagcatagctaggcttcaaaaggaattggaaccagtttctagaagattatcaggattagttcttctcactgtctctctttttctcttgtcttcctctctctgtggccacttaggctcttgtctctgtttctctgtgtattggcagccaccttctccaccttctccttttcctcctcttcctccgtggctctgcagaccagctttctcaactgcactacacacggtccaagcaagattcaaccagacccagttttcatcacttctcacccaatgccacatcactaatgcccaaccaaggctgagtcctgattccaaattcccaggagagacattcttattagccagcttggtgtgatagccaccccttttccatcatctgtatctagaaggatgggggaagtgtccccatgcctacttaataggagttgttggggggtggggctctaaaagctagcacacgtgggataggatcaggccattgatcaacatgttcatccttaacaccttggaaaggtccactaagcctatgatcacacaaagaagagccagtagagatttgacaaaggccatgaacaaaacaagtgtgatgccttttcttctttagttatttgcatggtttgcatcaacagtacagagtcacagggcagtggcttaacccccatgcccatatacctggatggagagtgggcacagccaagaacacaaggtggaaatcaggttgaagactgtcattttttaaaggcgaactgggcactcatgtgttcccttttctcttctacctttaggaaagaacatgaggttcccttggaaatcattcaagaggaagatggaaggggctgtttagaagagcttaaaagctacaggctgtaagactggggcctgagtgctggcagtggaaaacactgttgggctgtgatctctccctgaaaagttccaggtgccttttcgcttcctgcaaaagaaaggaagcgaaagagaagaccatgtccatagccctgaagcaggtattcaacaaggacaagaccttccgacccaagaggaaatttgaacctggcacacagaggtttgagctgcacaaacgggctcaggcatccctcaactcgggtgtggacctgaaggcggctgtgcagttgcccagtggggaggaccagaatgactgggtggcagtacatgtggtggacttcttcaatcggatcaacctcatctatggcaccatctgtgagttctgcaccgagcggacctgtcctgtgatgtcagggggccccaaatatgagtatcggtggcaggatgatctcaagtataagaagccaacagcgctgccagctccccagtacatgaaccttcttatggattggattgaggttcagatcaacaacgaggaaatatttccaacatgcgtgggtaagttcattaccagctctcagtttttttgtcacctgcacaatcttcactatgaaaatttgcagactgcctttgaatgctaggtagcacccatgcattaatcccatcactcacatacctgtagtgagtgatatataagagcctcattgaaatgaaaaaaaaaactttatggaccacttacatttattttgtggactccagtggtacacataccacatgctggggaacactgacttggtgaaatattaggtgtgattgtgttggctttcttaggactagatgtcagactcactcacttatcttgataagattattattttttggttaactgactaaagttacatggactctgatgcagttactggtatttatatctgaggattaagaaattccagtgtgagaattcatagatttgtttggggatcaaacaaactgggggttcaaattctgaggagaaagagatcctgaaattctcctccctcttctaatcataggttgttaattccaggctgtgctgtttactttaacccttgcgtatcttctggatacactgggacacttgaaatgcaaattagtttgtttgctttgtgctacaggctaaaacacttcaaaaggaaggaccagtcagtcttctctgcctcttacatttcttcatgatgctggtcattagatttttccatgcactttcagactgaatttagaatttagtgttttatgccgtaggctgaataggaatccgcaatctcctatgtccactgttgtagctccagtgcctaacataatgccctgccaccttgtagacactcaggaaatatttgtggaatgatggaataaatacttgtgctattagaaagtatgatttaaaagccctgagatggttggagtacaaaaaacgtatttgaaacacactgttgaaatcacctctagattggggtaggatgtgtccccacatagcacctggaaagttgagaagggcgtgtatggaagtaattaagtttataccagaaaaaaaatgtatacattgattgacgcagtatgtacatcttgaaatattcggcacacaaaccagtttgtcaggatcttggtgttgctttggcttgtccagttccctcatacttctctctctcctaccccttcttaacaggaaggaggtaggttgtatgtcagggcaaatcccccagttcacagcataggaggaagaaggcaggtttcaaaaactcccctgggcataatattaagcacctcagagtggtggaaatttcttaggttcatgtcttttgcacttttcattgactgtcataggctacttttggagctggaaggattttttcttttccagaagccttactagcaactgccagtgctctatgctgaacatgtaatagcaataaagataaataaatgtaggcaaggatacctcctctttgtccttccccctgtgtcttcacctgtatgctttgaattctgcatactcctgttctctctgcaactgtggctaccacagagagtactgaccagaagtcatagtacaaagccatggtgtgttacttgagagagaggaagtttctggctgtctggctggaaaacaggacatcataggtggttttgggctttgcttggaagaaattaatggatgcctctatggatgcctctatatcccccagggtaaccgactttgctttatttttctagacattttcttagtcattcagtatgcttagggaacgtgcttacctggtcagaatcctctgtttcagctctaccccatctagcctccattgcatacttgtattttgagagatcgtaaagatttcttcccccaaggaaaaataagtttgggaaatgctgagtgaaattgatttctttaccacaggacttttaatatgccaatgtgcattatgaatttccaagaaaagaatagtatgtggtggttccttatttgacactggtacctttttttttaaattaatgaaagaccattagcatcttttggaaaacgttaagctgtatatattacagttgtcaaacttttgtttatatcagaattatttgggccttctgttcaaaacgcaaattccttgaacctctcttccccattaacaactaaatcagaatctcttaggtgagacctaaaagcctgcactttttagaaaggaaaactgtagtcaccacattgtataatttatctcttgaatttacgctttctatctaactgaagttttgtattttttgaccaacatctccctaacgccctctctatacctccagcttctggtaatcaccattctaactctctacttctatgagttcaacaatcaacattttaagattccaaatatcagagaaactatgcagtatttgttattctgtgccaggcatatttcacttaacctatgttctccaggttcattcatgtcacaaatgacaggatttccttattttttaaggctgaatagtattccattgtgtatatataccacattttctttattcattcatatacctgttagccatttgtatgacttcttttgagaaatatgtcagatcctttgcccatttttaaattatgtattttctttcaattgagttatttgagttctttatgaacctgtacttttaataagcatcttctgtttattgtaaccactcagaatttttcattcccccagaagtggtttgtttcttaccactctggttttattcatgtttttctctccttctgtaatcactcacttctctgtctagtgaattctcatgtatcctttgaggttcagctcagataccatgtcctctgtgaaggctttcatccattagaataccagctctttaaattatgcaatatgtctaattcatctgactatcacccactaactctagtcctggtaactttcaagttattggatggatggatggatggatggatggacgggtgggtggatggatgtttggatggaaaaataatctttataaaggcccagcacatggatgattctggtgatcagagcaaagttaaacaaatgtttctgaatccttttgttttcattcctggatatttcctgcaccttgcttccatagggttccattttctctgtttaacttttccaaggtgagatgttacggtcagtaaaaaccatcaccgtccaccttcactatgagagtcttcaacctcctgctcacctctgtgatttgccctcagttgctactgttgtggtcttttggaagaacgtattattaggagctactttctctgttacactccatttcctcctctttttccttctcctgactccagcctacttttcttctttttgatctttgtgctatcatgagtcattatcatggagataatcaagatgtctgtcagggtaaagcaaaagaagaattctaagcaaacaggaccctgggtggatgagaaatggagagttctgcttagaattacagctttgaatactgggcatatttctgcttgggaattgggaggggttcaaacttcatctcctccccactgtgatccaaggaaatagaaccggaaaatactgacagatgtgaaagcttcatccttagttagctattaaaggatataaacagctgttgatctctaccattgaaacattgaggaaagaaagctttcatctgttcctagattcagtcttaactaggtgacccgtgctatttcagaagtcgaactttctcagatggcagaataccaaacagatgtggataccttgtaaaccatagtttcccttactctctcttgaaaccttttctggcttcttttattacaaacccaacagatgtccctgtgaaagcccttgaaagagcagtaaattctgaagcaagggccacctccttttcaattatatttctttaaccatttttagacatcacagccaagacagtaaaatagaaagccatgacttaaaaaaaaattctattgcctgactaattacagtaatttttatggtccatcccccagcttccctgtttttctgttatataataggatttaatattttagacctgatagaaaaaagccagtagcaaacttagaggtcctccaactcatgggttttttaagtctttgaaaagaaggaataagaacatgtataaaacaattacatgatctcacttacctctggggttttagaataagtgggtgtcagggcaggaaagaacaaagaaagcaagggagggaactgagggagggaattcacatctattgagcctgctaaataccaagccctgtgcctgctactgttaatgtttcttaattcttacaacccaataaagtaaaaatgaagttaatatctcattttaccagtgaagatgctgacatttaaacaagctgaagaagggctttccttaggttgtacagctaatacatatttaggagtcagggtctgagctcatgagtgtctggccagaaatctgtgcctttgtcctatgctgccattcatagcatgtattattatttcacagattccccttcacatggtaaaggcttttcaatgaatggttttaggaggttgtttaggatggagaaaattttataagacctgttttgtttttgtttttgtttttttggctagaacttttagataaaggattcttttttttgattattattatttcttaatcatctctgaaatgcctgaggactgtgtccaggtactgtaaatattccttcattccattctaagactgggcagcagattacttagcctcatgaaaaccctctgctggcccataactccctggtaatgccatttattattaatttattctttcaatgagtgtttgctgagcacctattttaggttccaagagagaacaaagcaggcagaacccctgttcttgagcagtttacataatgtccagaatgtctagttgctctaaattgattctgtacatatttctaaagtaagtagtctgttcagtggtcaagtgcattgtggaaatagttgcatccctttggtaacctttccgatgagactacagctgagtctcatcctccctcacatgctgtggcaagggatctgaaaatataaaaacaagtcaaccatagggataatcttctcagacatgggatgttggggagttgagtttatgattggcctttacattttaagtttttttttttttttttttaatttttgagacagagtctcgctctgttgcccaggctggagtgcaatggcatgatctcggctcactgcagcctccgcttcccaggttcaagtgattctcctgtctcagtcccctgagtagctggggtcacaggcacctgccaccacacctggttgatttttatatttttttagtagagttggggttttgccatcttggccaggctggtctcgaactcctgatctcaggtgatctgcctgccttggcctcccaaagtgctgggattacagataatgagcgacatctcccagccaagtttttattttctattgtatgtctctcacatggtttttattttgatagaaatctttgtaacgctagcaagacagaatgggcatcaacaaaatatatttacagtatgttggaattagtactggacttgtagatagacttgggcttaatcaattagctctgtcacttagaagctgctgtgtgactttatctctaagtttccattcgtttgtaaactaagggttataactgtgacctccacaggactgttgtaaggattaaatgaagcagtatgaataaaaacacccatcccagagcctgagacataagagttgctgaaaaatacatgttagttatctctctctcagtatacatttctttttaactgccaaccaaaactcttggagactattagacaatttttgaaccgtatcctcagtaaaataaaatgtgctttaaaagacttgacaagatttttaaaaatcatcagtcttcattgctgaatcactctgtgatgagggttataaatacttcaggttgacatctctcagagcctttggaaaattccagtatttctttaggctcctggcttcacagatgagcatctaactctagagagacatctactaggaagtgtcttctcacttgatttccagaagactgaatactaaacctgttcatgtccagtgtcaaaccagctaacctcagcagagggtaggaatgggttagcaggagaattggggagatagcctattagtcacatctgggataagctactcattaaaataacgttgggcaaggttacctacatttgatccttcaagaggatgggaaaagtgtttgcagagtactcactgcaataacagagcccccataatagcctcatgcactggcaagtttttccaagactctggaaattcaatccacctgtgggatctagtaaactgtttggcttcctaagaatttaccagttgggaaggcatatgaataaagctgccattttctgaatgcttgctaccttaaacacttcatctgctgacatgttttggctgtgtcccaccccaaatctcatcttgaattgtagctcccataattcccacgcatggtgggagggacccagtgggagataattgaatcatggggccactttcccccatactgttctcatgggtagtgaataagtctcacaagatctgatggttttacaaggggaaacccctttcacttggttctcattctctcttgtctgctgccaagtaagacgtgccttttgctttccaccatgattgtgaggccttcccagccatgtggaactgtaagtccattaaacctctttttctttataagttacccactcggggatgtctttatcagcagaatgaaaacagactaatacacctgcattatgtcatttaatctgtaaaataaccctgtaaggcaggtagtataatttccatttcacagatgagaaaactaagactcaaaaggattaagtaacttgccagggtcacacaggcagaactgagtttcagacccaaggtgtctcaactccaaagcccatgctgtcaatgactccaacatctcatgtctgtggtgttcttaccccagagtcaacatcactcttggcttgccctgcctgttgcagtacatgttaaatcctctcgaagggatgccttgagacaaaaccaccacagagagggacttgaaaaaacccagggccctgcacctgatgcaaactctactgggcccttactggtaggaactctaagattctgttcctttaaagaacttgcctcctgtagattctgatgctacccaagtttattcagttgtctattcttggaaaacatgcagagacagctgaatccactccctgcaccccactggctgctggagaattgatggtctattatgatggtcacagttccccaccacaaccttgtgaacccaatactgcaatgacttggtggctgaattaatgagaacagtgttaaataaccacccctgctcaacaaatcccaagagatacctctgtttagggcctccagtgtgcaaagaagcagaaaggaaggggagtaaaggcaggaggcccttagagggcctgaagactgctctgtaagttacagctaattacctgctgtccggacctgcactggattctccattacctgtgctatgtaattttaatgggctgtatctcaggtgacaagttgttacatctcagcaccagctgggaagggaaatgggatatgtgatattcagtggaagccagagattacaaacaaaggccataatagggtggggatgggggcatctgctgcttttattccattcgtcatttgtcatttgtagccatggcatccttccttagtcaacgaagcctgtactgtggaggtcagtagagcttggagaggcaggctgtctaagtgtcaagctttaaggggtgtatcagcagggccctgacaccagagggcttctttctgccctccccaccagtgccctgccttgcctctagatagagagtatgcagatacttatatgatgtcattttgccagaaggccaaattattagcctgccttacacccccatgtgtggaaagtgattcacaagcttttccttcaacgaacctttgtaggcataaggacgtgtgttatctgcaaaggtctctgcagacaggacctttgggtgttatatcttaaaaaaaaaattcatgctaatttcctattctagtgaataattctgtccatattttctttcacataatcatattttccccttaataaatgggatgctctaggaagactagctagtttgggaaggggatggagtagttaaaaggaacagaagtgttagtttctgttagacctgagtttgaattctgatgatgattttactagcataattttagtctctctgagcctgtcttctcatctgtaaaatgcatatacaggtacctgcttcatggaattgttaagaatataaaataacatgctacgtgtgaagcccctgacacaatgctaggacatagagcagtaagctttaaacgttagttccctcagtatcacagcctcagtgtgatacaatagactcatcaggtaaatcaaggttagaaagaactaaggatcaaaagtccataattatctcaagcatttggctgtggagttgatcatccatgttcccttcatcttttgctatagcttggggaacaaatgaaaggaaaggtagacattcatgggatgagattggcgttgcttggccttgacagctagaatcaggaaggagtctctaatagaactttagaaggcatttcacaggcatagcacaagtggcctgcacaaagccagttccatcttctttctgctgcaggatgcagcacccagcataacattcggtataaagtagacacgtggtgaactactactgtagtgcaagtgtaaatgaattgaaggatgccacatagttcatattaaaaaaaaagatgtattcccaaaaattgggaggcagttgaattttttgtcacttggctaacatcttcatttctctgagagttcaatatttaaacaaaacttggcgaagaggccttttattatgtgaatatctccttagtgatgtgtctaactgaaccttagttcaggccttttgtgattaaaacattcgtcgtcacagagactggagccagagttgttagttctttctcaggaaaagaaataaccattattcaaaagcagcaataggcttttgatgtttctacatcatccagcccaggtcgtcaggactggagagcagcgaagaattaagggagaagctgcagccaagagtcaggtgttcattgtgttgcccaccccctggatcatatcccttgacaatccgccggcaatgggaggctcctgcttagtctctggtgcagctgaagattaccctaatgcctgatgtgacagcacagtggggcctcagtgtctggggaccactgagaattacttgtggatcactctcttcaatacctccttgattgcttgacccagcctgggaattctactacagttaacaggaagaaaagaagttgctaaatattgcggacttacctattatggccctcagataagccatccatatttggcatctcaaagtggaaaagaaaaagcctgcagccaggggcatttgtcttcccatgtttttgaagagaaatgtgagcaaatgtgtcaacgaggtaccagagtcgctagaaactacctgtgggcagtagctgtcaaggcacatgggatggctgctggcttttttctgttttccagaaatagtgtaaagtcccagagctcatcttcagttctgatttaaatctgctcctctccttacgtaagctctccctatgtaagcttggcaaaccctgaacttctctgagactacctccccatctagaaggtgacgtgggaaaaataataatacctgctttgtaaggttatcagaattaagtgacgtaatgcacataaagtgcttaggatgttcctggtagagaattaaatgctgaaaaaattttagcataatttcccttttcaaagtgatataaaaaggaaaaacctctgatttattacagcttttactgcttgattacataggagaattttgccttcagtacctttgcacatttatttaccagctgaagaaaaaatggagagacgctattgatcatgtcacagttccagtgatctcagaaaagaaataattttttacatccattagaatatcagttgatcaaaatttgaataccaactaagagtgatacattccacttttaaaataaggtggtaattccaaagcttaaaatacagtaataattatattaactagcatttattacttattctgggccaagcaatatgctaggtcttttattatattttttctaatcctcacagcagtcctggttaaccatcattattattatccctattttcaaatgaggaaactgagataaatttcttctttcaaagtcaccctcctagtaagtggttgatccaggtttagaatccagacttgcctaactacaaagctacagagttttttaagctgcatttgatgaaattataacctttcctctctctaaaaacataataacttaaaaacaagatgaaagtagtgtctataattccctgttttctggaaatgataaagattaaattgggataaagtatttcttttcaagtagaaaaatttaggcccactttttcatatatgtacctatttaaagtacagatgtacttgtgaagatatctttatgattaacttgaaaaaatttactgccttcccttctaatacccgagctccatttacaaatgacatctgaagaggtggaagaaagcaggttgatgtggggtattttatcttttccttccttccttcctttcttccttcctttcttccttccttccttccctccctccctccctccctccttccttccttccttccttccttccttccctccctccctcctttctttttctttctttctttctttttctttctttctttctttccttccttctttccttccttccttccttctttccttcttctttctctctctctctttctttcttttcccagaggacaggggttgcaaaggcagaggtttccatttactggaatgtcacaggaggtgcagaacatctgccatggccttgtgctcttgaaatattatgccatataatgttcttagatggggctcagagagaacatgctgtggttgattatgatatctgcataggtgcaagactaaagaatgtgtatcatacatatgccattcatgctcttcactgttctgaaaggataattattgacagcccaaggagaaggccagtcatgtgtacattggttttctgaagtctaacaactaccagggctaataaagctattggggcatgatcaggaagtatgctaaaaccaaaccaaaatgttaccttcttatcaaaaccctgatggtgagtcttgaaatcagagtgcccagcccttggggcaactcaaggtgggtgtatgagaatagaagacggtccagggtatggtctctaagatgattaagaaattgaaaagtaggggttcctgattggactaacttgaattcttcaggaagagggaaaaagtgaaaagctgtaaaatcataaagggaagatggcaaatatggttgggtattttccccaactaaatcctgatatttaagaatacctttcgcagtttgagaaggttcagtgatagaccagtaaaagaaaggaagaaatcgtttatgtatgtttggaaacttaaaaacttgttactttcagtgtggtatagactacaaataatagagtacaggatgaataatgtaatagagatctggactacagtcccagagtgagctattgggagagttgatgtatatttggtggcacgttcctgactgttgagcttggtgtcaaatacccttaagcttcaagatgcagtgggaagactagacataaggactggccctgctgcttttcagttgtgtcacgcagggcagtagttctcaaagtgggtcctagaccagcagcatcaggatcccttgggaacttattagaaatgcagttataggcttcaccctatatttagtgaatcaaaaattctggaagtggcccagaaatctgtgttttaaagctctgtaggtaattctgattcaagctagagtttgagacccacttgtctggggcgagcaaattctgcctgagccttatttttcagatatataaaataatgatactaacacttatcccacagggctgttactttgaaaaaattatttacttgagacattgtggttatggtagcagatgagacaggcccagacctcatggaacttacatttcagtcaggaaaacaggccccatgccagatggtgcaatgaaaggagctaacgtggagaactagcacaaaagtgctgagagagctcaaagtcaaactgggctggcaaagcaacaatataatattataacaagagccggaagccactgccaccttaggcttgcatgagggaagtcagagagggtgttaccagggctcaggagccaggggcaaagaggggaggtcccttggagccaaggtgaatagcagtactgcctgacccgaaagggcagggtgggaggtagaaatacctggctgtctgcttccctcctccagtctcctgccaatgcttcccactgtctttggcaaaggagcctgggaaacacgttttgctgaggaaagatagagaacggatctgagagcaagtaggcaaataactggcttatggagaaaacagataaaacgcaaataaatatatgacataatgtcagataaggataagttctatgaagacaattaaagtaggaaaacggaattaggatgctgtaagatttaaataagacagatgaacaacagtcagtgctcctcaaattttctgtggtttcagaaccccttcatattcttaaaaattactgaaaatcctgatcttttgtgtatgtgggtcatatctagcaacagctaacaatattagaaattaaaactaggaaaatttaaaaatatttattaattgagaaagtaataagcccattacatgctaacaaaataactttttttatgaaaaataactacatttcccaaaacaaaaaaatttttgagtaaagagagtaatattgttttactcttcacaaatctctttaacgtctggtttaacagaaggcaactggactcatatccgcttctgcattttcagtctattgtggtttattgttttgattcatgtcagggctgacatgagtatgtggttggaaaggggaggattttgtgtacctttgaaagggtccttagggatccatacaacactgagaacactgctggggtggggagggagtcctttgtacctagtaggcactagactatgttggttgaaacaagacaagcgacaattgcattacgaatttcacaatatagtagtccccctttatctatggttctgatttcctctgtttcagtcacctgtggtcaactgtggtctgaaaatattaaatggaaaattccagaaataaatgattcataagttttaaattgcacactgttctgagtagcatgatgaaatcttgctctgtcctacctgggacaagaaccttccctttgtccagcatacccacactgtagactctacctgcccattgctcatttagtagatatctgggttatcagttaacctttgcagtatcacagagcttgtgttcaaggaacccttattttccttaatgatggctccaaagtgcaagagtagtgatgccagcaattcagatatgccaaagagaagccataaagtgcttcctttaagtgaaaaggtgaacataaggacttaaggaaagaaaaaaattgtaggctaaggttgctcagatctatggtatgaatcttctgcctgtgaaattgtgaagtaaaaagaaatttatgctaattttcttgttgcctctcaaactgcaaaagttatggccacagtgcatggtaagtgcttagttacggtagaaaagacattacatttgttggtggaagtcatgaatcaggccgcacagcaggaggtgagtggccagtaatggagaattactgcttgatctcagcctcctgtcaggtcagtggcggtgttagattctcatgggagcacggaccctattgtgaactgcacatgtgagggatctagattgctcactccttatgagactctaactaatgcctgacgatctgaggtggaacagtttcatcctgaaaccaaccctaaccctgctgtggaaaaattgtcttccacaaaactgatccttggtgccaaaaaggttgaggaccgctgctttatggtatttacccaccagtactgatggcatttcacatcagtattcacagttatgtggtctccttatcacagagtttttgggagcaccaaaggaaagatgctaattgatctttaaaaaaaaaatgaatcttctgatttccttagcactatgttcaccctaacctaatgagctaattcagactagatgcgtaactggtgggacttgatacacacacagaaaatatcttaaaattgaatgaatattttataattattgtgccatacattagagagtggtggaccaccaccagttattcaccttgcaaattttatgcaacaaatattcaggctcaggagagctttctataatatccaggtcagagtagtcatgaatttcttcccatcatccattgatacgtattcttatagagtaccaaacatcagccaagacccaagtaatacagtaaggtagctattatggaaaaaaaaaaaaaagaaggaatcatttagaaagtatttgttctcagaattattatctatgactctgctctttccatctacatagataattgaattcagcattaactgagccccatgacaagggcactgtgatgtagttgaacatcagtcagcattaaagagacatggccacattgcttcaacctgcagatgggcagatatgtattgcccactgtggacagactcatttctgaatgggatttatagaacatcttatgctacatgaaatgtgttttactgctagggtgagaccaatcttacacctgccttgctaaccaggttttgtcatatctagattttgttttagacagttactgtaataatgatgtctaccattttctctccactgtaggttaactaggtgctttacattgctaccttacctctcacaacagccttaccccccaccaccgggcccacccccaaagcatgacaggcaaaacagccttttgcctgttttcccaatgagggaactgagcctcggagaggttacaaatgttgcacaggtcacagcttataaaggtccatagtaggtctttctggctccattccattttttttgctatgccagagacatctgtgataggagtattctgggcacatatatgcatacctttgcataaaacacaaacatgaatatattcaaagacagcatgagagggggaaaaagtaaaaggataatttgaagaagcaaaaggttttgcttctctgtgacaccaaagcatgaggtccctgcagaagaaatcctgcatggatgaaataaagagatttcaagtcatggctttgctactttctcattgtgtcttgaatacttggaatttgactcatggtctgctgaaactaaaaagatttgtgccaatggtaaaaacctcccataataaggtaagacagatgagatggttcaataatttgtgtttatggtgaatgttgagtgtgtatatgtatgtgtgtatgtatgtatggtatgtcttttaaagataaaagtctcaccggctaggaagagaaggaggaaaaaaataaatgattattagagtatgacaactagccttgtagtttcacaattaagaaatgagcagaccaatataattcaatgtctgtaacatttaatttccagtccagtatataaaggtagattctgtttgcctttcctctttactcctcagtctgttaaccttgtttcctcccctgtaacctcaggaaacctaggtcttcaggttgctgtaaggtcttaataggataatgcatgggactttgcgtgtagaaaatgttcaataaatattcactaatattattgctaataatattgtaagtaccatatttctgcaaaggagctgttgtgtttttctcccatagtagaagctacacatatcaataaaccgttgaggctcccagaagtaaagaccccagaggccctaagtctctttcaacaggtaaggtcagtggtaggttcctggacttgctgctgaggtggacttttcggccatggtttctcagtcacccctcaaggagttgacactttggggcccatgaagttttttagccctaaaacatgttgactctttaaatggctgtggaatctggctgcccttatcagtctacagcgactcacggggctgattggacttcatgttatttcaggcgccgcaagtgtacgtttcatctcttgcagctccttgtcctcccaacggtgctatccagcagctgccctttgaggaatgtcctttaacaaatatgaccaaaactggagctcaggtttttcacatgaagtattgtagcctttataacaaactggcaaggagacattatcaaagtgaactgttaaaattacccaataaatagacctacaaggtcctcttgccccagcactttgcccatctgctaggtctccttcaggcacctgcctcatcctcttggctgtatcaggggtcctgagcctccttcagctgaaggggacctcctaccaccaattcagcagtagcagttctgaagcctgtcacaatctcagactgggcacggtaatttcaacaaggagcaagtaagagctcccagacctgggtaggaacagggctttgaatccagttaccttccagctgctagtgccctgaatttactgttagagctttctctaaggttaactctctgctcctttgcccatgctgaagcagtagtatacggtagggtgacgatgaccttccttaaaagatttctcagtgctcttggctatttatagttactgttactgccatctgtgaatccagcttctaaaaggtaaactggttcgtaccacaatgtcttcgtggtgttagtaaatatgagaaggaaaaatgcatcctggcatatttgcatgggaagccttaacaagaggccccttttcatctagtccagcagtctttctccttcatttgagaaatagcaatgtggtttctatgctttcatagcttttgggtgtgtctttgttttgaataggatttagcaaagtcattatctcatgctttaagaagaagtttccagcctaaaaacacatcagtacattttttaactgacatgataaaaaactgaagccctcttcccttggagataagccctgtcaaatataaggcaggcagatgtgtccctgtggatgactctcgcttctattgtatagctcactgctcataaataatgaatttgacaaatgtaaaatgcatcagtgagtttcaaaaggagggctctggtgacagtgttgcacactttgtagcagttgaagggagacatttatcagctgttccctttttggatttttttaatgtccatcagctagattatattcgtcatattcatcaatgaccagtaataaatggattgcttataaataaataaatgtgctaacagagctatggccccttgattagcacaatgtccaataaagataggaaagttgtcattagtaggacttgaaaattaccaaaaaggacgaaattcaatgaatacctttataattatataatagtcccaaataggtcagagtttagaacattagaactattttactttttcctctagtggtctctgagattctaagaggtcttaatgccaagaagggcacaactgtagcccatttcccacagagcaaataatttattttcttaaaaaacatagatcatattaactatctactttctaaagtgcagtatcttcccactacaaccagaataaaatcttaaatccttaccttggcctactggaccctttgtgaggaggcccctggctacttttgccatctcctctttcaggatttccccttgcctgctggacttcagccaccctaggcttttttatgcttctcaaaacacactccccccacccccaggtcttccccccactcccagctcttccccctactccctttccccgagcctttgcgcgttctgttccttgtgtctggaaagcttggccctggatttttgcatagctggctgctctttcttcatattcagatccccgctcaaatttctccttcctttgggaggactcctctaaccatccaatataatgtgacctagatcccttctgtttctattagataacccgcctaatttccttaatattattttcactctgaagttgtttgtcatgtatatttattcatttatattaatcataacagagataagaagatcaataattccttactaaaaagtcaaataaaatgcaaatcatcataacaagtctgaagcattgccattttctgtggacacaattgcctgcaagcagttgtctaattcaacttgtatttacttactatgtacccaacagtacagtagtaacttcgggaggccaatcagacagtcagcaaatatttgttgactgtttcacacatgccagacagtgagctaatgtgcgaaacactggaacacagtgggaaacaaaacgtgcatgaccttgtcctcatgaacttaaaagcaaatagtagagtaagacctacagaggatggaagctccatgagtgtaggaatctcttccactcagtgttgcaacccagtgcctagatagtgccaggcacatgaaagtgctttgtataagttgatgaatgaacaagtgaaagaaataattacaagtgtgaaaagtttaacagaggaaaatgcagtgtgccaatatacaaagtacaagctcacatacaaatattaccaaacatacacaaagtctctaataggagccccttagaaatgatactttaggtgagaccagaagggtaaatgggactcagcaaggtagaaaggataggatggtggtacggggtctgggtagcggggtagaacaacagctacaaaggtcctgacgtgagaaaactgaggcatccctgaaggactaaaagaaggaaagtgtgagtactgtgcaatgagtgaggctggagtgacatgtgaggaagtcacagagggagcagggccttggaagtcttagaaagaactctggtcttggctgggtatggtggctcacacctttaatcccagcactttgggaggccaagtcaggtggatcacttgaggtcaggagttcaagaccagcctggccaacatggtgaaaccctgtctctactaaaaaatacaaaaattagctgggcacggtagtgggtgcctgtaatttcagctactggggaggctgaggcagaagaatcacttgaactcaggaggtggaggtggcagtgagtagagatagcgccactgcactccagcctgggagataagagtgaaactccttctcaaaaataaataaataaacaaacaaataaataaaagaactctgttctttattctagggttataggaagcctctgaaggcagatgagtgacatgttaagacttgaatgttaaaagaattgctctggccacagactggggaggggcaaggatggatgcccagtgtcatggagaaaaaataatttttctctctactctacctttcatagctcttaaatggaacttcctgagaaaacacacacatacacacacaaaagaaaacaaaagaagtttataaacatgtatactttatgtacacatggggaaaaccccagagaaatgaatacatttctccagcagagctcaaagaaaaatagtttaaacctcaggtttgtgccatagtttgctgaaacaaattaaaaaaggagtgtggggaaactctggttatgggaaaatggccaggaaaagagaaaacaagggtaagattatgcagattttagtctaggccttccctccctcctcatttaaccatccctttctccctggtggggagagaaagagagagagagagagagagagagagagagagagagaaacaccttacaaatggtattttcctttagatgtacatttctcttacaagagtgacttttcagagctctgcctgtgtctacagtttttcaaaataatcagtttgaaatagtcaacatgccaagagacatattttagagtggtgtattatgttctcctacagtcatgttttggggtggtttttcctgagccccagcaccaactgagagccctttgcagtggcccagataagagatgatgagagcctcaactcaagtgtggaaagagttgggttgattggagaggtttaggaggacaagctgaggaaatgtgtgaggggtagagcagggagcaggaggagtaaaggtaagccctaaatttccggcttgagcaggggagtagagccatttactgagattgagaatcttggaggaggagttcttgagggtgggaagtttggatgagttgggtttgaggtgcctctgagatattcaagtaggtatatggaccaagcaggtggatatataggcctgggattcagaaaaaaaggtcttggctgggccgtataaatggcagctgaagtcatgggtgtggctaagagcacttgtgggttaaagcatagaaagaaaaggcctaggacagagctttgaggcacaccacatttaatggtgggtggagaaaggggaattgttggtaaaggagtttgaggagaagtcagagagttaagagaaaacacagtggagactggtattcatgagcagaggaaagagatgctgccaagaggagggggttgaaagattaagtaagacaagggcaggaaagacaagtatattgtaggtcaacacaagagggtcagcagacagcccagatgagcaaaaacacttgtaaggcagcatttgtcctccgaggggtattctaatctacatcagtatctaatcaacatctctgattccaaattacaaagccaggaatgtcagtctgcagaagtagtaagaagacatgaggctaccatgcatcttcacagaggtgagcaaataccctgagtctggattttttagttctatttccattccctcatgatgctgggctccacctcctgctcttgtttccttttatcaaattgcttatgtttgcttctgttggctcaagtggttttctcttttcttaaaccaaaagagctttgatttagccaagaattctttgactcgcaaggagaaggctgcttgacctctgcaggctctgtaaaggtcactcttggcagtgattcagtagtttagcaggtttattactgtagcctgcaactcctaagccataaattaagaatcccatgcaccttcaatatgcatggaaaggcttcattctcatctataaatcacaggaattctaaaggccttgacaattcacagtgcaacctcccttcgctgcttctcttccaggaattttttcagatttgattaactggagggtggagatggagctttgtaggctcatttgatatccttggccccatgaagaaggcagagaattctctttttaaggtagaaggcatgaggttggtttatctcaaagatttttttgcatttctgatttctgtgacagtaaatgattaagtttgcaccctcaaatctactaaacatctgacagcagtttcacctctatgtggcttaattcatggctgcttctcagtttaaaatcatcttactgcttaagatgggtgaagctaatggctgtagcatggtgcagacataggtggaaaatgtgttcagagctagaaaaggggagatagggactggagtaatttctgatttaaaattattatattaaagtataataaaaacatacatatataaaaaatcattactatcatacataaatgagataatgtttacaaagccctgaatttaatatctctttttgagccggtactaaatttatatcaaatatgtatcttcatatttgaataaaaaaagtcatgctgcaaaaagaaaatcagcaaatctcatttagaaaaaaaaaaatagttcctgaaataaagatgttgattttcttaaagaaaagataatattctcaagagaaaagggtattcctgaatctattttctaacatcagtctgtctctcagatgaatagagaattccatgtaattggggaatatttttgtgcttttagcaaagatggaaaacagcttcctttctcctcttcttttcatgtcatccttggagcattcctttaatgccccatttttctgttcaagagggtatgaaattaagcaggtggagtaagaacttcctggttatgcattaacactgattaaaatgcatagcccagaatggaatcccaccattatttcaaagtcaggatctctgcatttttccagtactatttttgggcaggaaaggatgagactagacaacttccaggatcctctcaaatactaacgttctattatggaaaaggattgtcaatgacagtacctgttctgagggaagataaggatcagcggtgtgcaaacctggcagagatgcagttccattcaaaagagacttgcggaaaacctaccatgtgctgggcatgagataaggcattgcagggcatagaaagaaaagcaaaaagtacttcctgtccttgaggttactatctcaaagtgaaaagagactactaaaaataaaagctttactactatgacaatactgaatagaacttttacatttgcagattattccagtatctcaaatggcaataaccctgtgattgaattattactgcctctacaacacagggaaagaaattcagcacatagagaaaaaaaaaagaaatcttacagaattgtaaaagaagagggagcttctatctggttgaatgatcaaaataggttttatggaaatgactggaagtgaaaccttggatctactactcttttctgtgaccattttaataatagatagccttcttccctttaattaaacttttatttagcagtgcaagtttctggtttatttttctgaacatggtagttgatcgtctgatgtcttttgcttctgtgaagcacactgcctaatggatgttggactgtttctaaagttacttttcttcccaggccaatattcatttattccagcatatgctagaggtgttgggggagtttgtaacatgccttgggtctcttgctacacagagttgtgtttatccgtcatgttgatcagttgtatacaatttttaatgggaaaagcatgactttactgaccttttctgaacaaataaatttacttaagtctgcttgtgtcatttggaaaagaatgttctttctcttcttctctgggactgcctccagtgttttgcatttcagaatcccagaagttcccagcttcacacatccccagtcacctgactccacaactttaaaagcagactggaaggggacctgaaagaagatagagtggagacacagagttctgtggctgtcagtcatcagtgttgtaccttggtctcaaggaatatttacatcactggtcctcatgttatctccatagtagttgattcttgctgccacttaaggtcaagctctccctcccaagaaaggctttgtctttctagaagatgcctaaggctgtcctttttgtgggattggactccctctgaatcttgtgaagaaatatccaagaagattcatctgtctccttccctgtctccatttttttcgtggctctcctttcaaatatggtaattaagtcactaggcctgtttggaaggagatcaggagttagctttaacaactaaaataaaaccacatgttacatctctagttaagtgaggaatatgtttgtttaacttttgtttctttggatacaattcatgaggtttatttatttttaaattgtagggtgatctagcttctcctcctttgagaatataaagaatactgttttaagggtagaaaatcatttttaaaatgagaatttatctttaaaataattgaatttttcccaatacagaaggcattttttctaactctgcacaaaatcgcagtcatttacaagtggaggaacctgttttaaaaaatgtctaaattagcattggccaaattcttggggctttaaagtctcaggtgaaatctgatctttgactgggatttttttttttttttcccaagcaggcaggatggcagcttaacaaactgtggaacagaatcccatggggttaatgatctgaacgggagggtttagaaggttaatgtcacggtggtaagaaccaggagttgttgcgcctactttcacagaaaatactttaaaataaccaccaataaaatcctcactaagaatccagatgagtggccaaatgagcttttgtgtttcacgatgacctgttttaggaatttttcatctcctttgaattccgcctggacgaattcttcttttaccttggctttaacttttcagttaactataaaaaatatggtgtgatgttattgatgcagacacactattttagtggtttcaaacctttttatatttttcaaacaaaaaaaagacttagaaccttaaatgaaataagtaaaattggttctgcgttggctgcagtagtgggtgaaaggctcagagtccgcactcctaccctccccgcctggtcctccaagatgaggtagcttcctttgctcaggaagcagaaccctaaagctttgaggagcacaatttgaaaaccatggctccatagcacttgccacttatgattgcctttggggcctgctttcctctttgtgggagtcagaaatgaatcaaagaccatgagaggctgccggagagcaccatccctgcagcacaggaaagaaaagcctggggctcggttgccaatcccttgtggcctcagcagttcctctaagcttccctaattgtactaaaaaggtgtgcctggcagaggatgtggagaatgaaagtaccaggtcaaggagtagtgatgtcaccttaaatccagagagattgatcagacagggtgaaatgtttaagcaacagctctgggaagcccttagaaggcaagtggcaccctcagcagaccatcagggaactctgttggagcaaagggcctccatagaacttcgttgcattcgctcctgagctgcaggcactgatctgtctgcctcagacactaacttagatcttctaaccctcagcacatccttgctcctcctctctgatacctagtttcagagtaaccattagagacaccatctgtgcttttacctggtgatagtgcttatcctttgaggggcaaccttgaaactcagtattatggaacttccaagttcgtgaccttgaatggtaactttgaaactaggcaatcttccaccagcaccactggtgggctggcccaagctctccgtctatgcaacagccacagcatccatctgagtactccttttcccagattctcagtctccagtgcccagcccagcttcctcctcctgccactaactgacacagtgaactaagacacagtaagacaatgagccattgtcttagttctagtttctctgtttgtttcctctgtttaattgttttagaatctatttttctcttagctatttatcattttgaattgctctgagtgtgattagaatatttttaggatggttttgtcccctttcttttcctttctatgacttctgagatcagatttcagctgttgtctgtgtgagacactattattgctcattctgcatatactacctccctgatggagatatttccaaatatcacacttttccatgtggggctatgcagctggctggtttgttttgatggccatatttcattgggctttccaagtggttcatcttagagcattattgagagttgtaaagccaaccaagacctcttagttgaagtgggtgtaatagggtgttcctacgatttatgagaagctctagaagtttaactctgggcctttccctttatgtcatgtcatttgtagcactgacctaaaatcagggtgtctcctaaagacttatgggggttacatatagattgaaccattttgaatttctaaagtatgtatgagtcaagaaccaaaatttgagggtgatcagaatgtcatgtttattttccttagtttaacatatctgagtatagtccctgttccaccaggtggtgggaaagccagcttagacattattcaggctttgtacccttcctcagactttggtaaagcttccaggacttaactcagtgccaaaatacaaagcaacccacccagtcccttatctacatgggttaccattgttccagcccacatggtccccttgagcatgcagcatttgtgctaatcttagagcacaggcatctttggcagagctgggagccatggcacctgccatccagccattttagatatgccctgcagctatcacctttgttgagtggccatcttccctggcaataagtcatgtcaataaattatcctaaaataacttccttctgtttaggctttggaccgcaatgaatggaaactcaacatttttactttgttttacctttggcctctaccacgtcttatttctccacacagaacaaactcatctctttctagacaactcctattcatcctttgggtctcagctgtaatatcagggactaagttagaggtacccctgtgaacaccctatctccccaaccgctttcttactacgttgtacttcaggcatgatttgcatcagcattacctgggaaattgttaaaaatgcagaactttggcctctgcctgagatcatattgctgaaacaaattctgcattttaacaatttccctaggtggtctctgtgcacattccagtgtgagaagcacagatatactagatcatgagctccttgatcacaaggacattattttttcatcaccatgttgttttgatatgcctagtccatagcagcccctcagtaaatagctgctgaatgcatggatagcctgtaataaacatgtagaccaaacattcagcttgcagtggctgctgttagagaagggattatgcctaaagtgtgacccaggaggtactaaactggaacaaactggggatggaagtaggttggtcaccgctcagtgaaaccagaagtattgggttgggttcaggctaggtagccaggcccacaggtgtaaaaaccaacttaataggcaagatagggccaggtgggcttggttggagggactgctggagagcctgacctaggagggagggaagcaaaggcctcaccaaagaggcagaagagaggataaggaaacctctgtgagggctcctgaagggcatgatgggaaataaatttgaacaggaagactgaaattccaaaggcattcatttcccattcagtattgaaacacagattccaactagatcaaagacaaggcaaaaaatatgaatagaatctttattgttctgcacattccttttttttatttgaactaggggaagatgagccacaaaaaaacaatggagtaaatccatctctcgagtttgttagaaaatctgagatttattagtgccttctatgtacctacttatcccagaggcatgactacctgggctgacattaaggcactactagagtaactggagcagagaggtggctgcatatgaaaagcttttccttgtccttgcagacatctctcttcaaaccagtcactctgaaagaatgtttgacgttagccacatgggaattgtctggcaggtgacgtggttcatgcctgcttgcatttctttttcccttggaggtaaccagatgctctttgggaatgcttgcacatttgggctatatcagttcctgaagtttctccttttgttgaacataaagtctatgggttgtactaaggaggcttagccctggccttctggtgggtgggaaaaaaaatggaactagcactgctttaggtctgcatcaaggtgccctgaactctgatgcaggtaggcaggaagtcaagccttggaggcatttttcactccctgccctggaattctgggatctgctttcaggagagcatgtagcccttgctctgcctttgctcatggcaaacttggatgttctcttcctaaattggcacctagaataatccagtgtgtgcttgcagattcatcttgcccacacaagcatgggattctgcaagaaaaatcaagcatcccgcctattccattaccctccatctctctgtacttgtcatgaactctgagagcttgcttttaagcacatgggggtggaggtgggaggcggggattattctgactgaaaccagtcctccaagtctaggcagtaggaggctgcagaaaaggaaatagtgcaagcctgggaagtgagtcttgggggaacctagaggatctcattattttccccttggattctgagtcgggcagggggggacagtgtcatgtattattctgagattagatatcagctgagcctggactcctttgaagaagcagcagctgcttctaggcatgaggtagagctctgacaggcaatggccatgacgctctggagcgagcttcagaaatccctgcaggggtagcattgtgtgcccaaacaaaagattcacttcacagtagcttggtcacctgcctggacctctgtgtgcataagctttgccaatacacatgatatctcaactgatgcaggcttgaaaaacagtgtatgtcccctagacctctccctgcaccccaacactataccttcctgttctgctcatgccaagcaaaaatgaaaacaaaacaaaacgtataacccctttccttcctatttggtgcttgtaactgagaaaattaggtttgagtaacactcaatgtacatgactttatttataccaagttaaacaaattaagagtgtgggctctggtatcaacacaggataggttggaatcccagttttgccacttcctggcttactaagtctctgtgtcctcataggtaaaatgggggataacagtagcacttacctcctaagatttactgagaggatgaaatgaaaccatatatttaaaggcttagctgtggtaagcactgtgtaaatattcaactcctcctgcttttccataaagaaacagagcaccctcctccttctgctgggtgaatcagggctatttcgtctaacgtctaatggataagtcagtttgccgtcactcttccttccttacctatgacttttccagtccctcatttcaggccctttgtggtttgattgatgaaaagatggtagaatgtaagcttgaaatacattgtttggaaataccttggggagggggatgctaggaaaagggaaaggaagagaaggctgacaaaagagcctcatgccttctaatgaacacactgaacccttgaccccttttagacataagcccactgcattggactttgggttataaatataggactacaatccattattctgaagtctagaaaaagcctgaaaaccatgagtgttttcatctgcatgaaactatttgtattctttatttatctaacttaatatgaacattcatgtttccctgaaaaggtattaatgtgcttgattccaaggtgctgccccaggctctgctgggggtgttatgtaatgggtactatatgtatcacagcaccattctgaattctgagaaatcctgaattttagaaacagatctgcccccagtgactttgtttttttgttgttgttgttttgttttttttttttttttgagacagttttgctcttgttgcccaggctggagtgcaatggcgcgctctcggctcaccgcaacctccgcctcctgggttcaagcgattctcctgcctcagcctcccgagtagctgggattgcaggcgtgctccatcatgcctggctaattttgtatttttagtagacacagggtttctccatgttggtcaggctggtcttgaactcctgacctcaggtgatccacctgcctcggcctcccaaagtgctgggattacaagcacaagccaccgcgcctggatgcccccagttactttgaatgaggattttcctgtaacaaaaactaactggaggtagtttagtttaagcaagcaagcaataaattatgggtggtggagaaaaatttacttctaagattacaggcatatttcacagaaccctagagcagaatgcagctgtcttgggaagaggctggaagagacctggaaggttgaggacagtttctggaaggtttctctctagagttttggttcttacgacacaagtatggaacatggatggctactactgatgcaccaacataactcttgtgttctaatctgtggcaaatggtaggaacttactatgtatgagttgattggcagattggctttccagtctggtatattctttgctcggtggccagtacaaattgcattatcccattaagctcaccatcagcatttgccctttgtagagtctgcgcacccactggattgggcagaagtcatgttgactgagtagtcatgggtccccatgcagtttatgattggcccccggtggttctttcactgggtttggcaatagcaagaatcactcagagtttatcttcctcgcagttctggggtttgattcatataagaacagatgagaaatgaagtaaatgggagaaggaaagcaaaaagcaattgctctgaaatgactcactggggacctgccctgttcctgtgtatctctttgggccttcagtttgagcctcatacacattattctgtgtccgtggctagcacgtcttgggacatggcttcatttggtcatggttattgggatgtttgggatgaacctctaaatcagcctaatcatttttcttctaagttcattgtctgtagtcttagtgtctttaagaagccacagaaacagtaaatgtcctttttccatttttcttctcttacttaacagcttcatacctaagcataggggatgtcaagaggctaactctatgtgagtgatgattaactgtcaggaagccagagctttaagatgcgtatgtagtcagcatgcacagacatttacactgtattgccttgagactaagggcacagactctgaagccagcctgtctaggttcatgtcctaattccaccacttactagctatgtaacctggagaaagtaacttaatttttctgtgtccttatttcttcacctgtaaagtgggcagattagcacctccttcgtatagttgttgagaggattaaatgagttaatatatgttaaagcacttagcacctgtcttataataagatctagctaaataattgatactttctctgatgaacataaagtctcaatcagtttattcatttattaaacaaatatgtatgttctgtgtgttttgcctgccatatgaaggcattgtatttgaaagagtggacaattcttgtaacttctactcttgtagtgaagacagatactaaaccagttattacacatgtgaagaatgttatgacccaagtgttaggctttctaaagagattagcagaaatcagataaccataaatccaactttattgattttttttccctctttaaatgctccacactaaatgctccataccttctttaaggatcagggtataagtaaggtgagagtagcttagtttagccatcataccaacagttgcttgcttgcaacaagaagtgacttaaatcttaggtaagttaaaaaaaaaaaaaaaagagtattgccattacaaaaaaagtcatgtatgggggccaaagatattcacagaacaggtaaaactgttatatttatgtgcaataataatattaatatttaccaaaagacttttaatgtttagcagttcattcatcacccttgattgtcataactgtcatgtaaagtcagcagggcaagatttatctcaatttgcagatgagaaaactgaagcccaatgtagtaaaatgactgaacccgagtcacaggcaaggccagtgcctaacacataataggcactaaaaatgtttgctttattgaacagcatgagtatcctgacttgccatgtagcgttctttctggctctccatgtggacccataagtaaagcctcagctctgtagtattttcagatttcatgctcattattattgggataattcgtctaatattcaccttctttccagattgactattgaacaacacttttttccagaccctatcaagatataccagatacatattcccagcttttttctgtctagattcaggacatagaaaactaattttcaagattcatcttttaaatgtttatgtgtacatttaataattttaaagatcacagtacagtgtctcctgataaattttttctgtaactggaatttacaagcaaagtacaatttgtggtatacatgcttcaacaagacctatgattgtctcttccagatacaatttttttgaaagtcattaatattcatcagagactgatctcatgaaaagtgtcatacaaaaagcttaagaagtgcatcactcccctcaaattgttggcaacacataaaactacatattgccaatgcatgaaaacaaagataaaatctgtcttcagctatcttgattaaatatggcatcttggttgcattccattaataactttaacttccatagggtgtctagaaacctaggtcagactatatcaacagaattagagaggtggaaccaagataggtgttggtcatatttcacatttaccaaatgcctctattgtaaaagtctcctctaaaaataaagcgttgaagttggactgaactatgcatttaatggtgggttgttgatttattttattgcagggaagattaaatgaatgaactgaggaaatagtgggaaatgaaagctgaaatgtaaattgctcagccagccacctatttgaaaggcaagatcagccccagatttgcaagttgaatgaattgaatatttgatcctcactattttccatttgtaacttattgccctgaaaagaggtagcattcattcacgtattcatgtatttattcattcattcactcagcaaatattaatggagcccctactgggttccaggcactgttttgacacttactgaggacacagcagagaacaataaagactaaatcctcactctcattgaacttatatctgcattgagagtggggaggagaggcaggccataatcagatatagatgtcaggtggtgataagtgctatgaagaaaagcagctagagagtgatgggtgctattttatacagtaggggcagaaaagaaagctactggagccacacctgaatgacataagaagcaaaccctccgacatctggagaaagcacattccaagctgagggaagagtgaataccaaggttctggggtggaaccacatttggaatgtgtgaggactagcaaggaggccagtgcagctggagtgtggaaatggaggaagttggaggtagacaaattatgtgaggccacagtaaggttttgggactttattctgaggatgacgagaaaccagttgaggattttcagcagaaatgtgaagtaacccccgccccccggcctggtgttttaaaagaactactctggctgctttgtagagaactgcgtggtttgaaaggagcacccaaggtgagcaaaaagacctgcactttatgctactctcacttaactcactctagggctgtgtgcctcaattctttgcctataaaatggaggtgagagtggccgggcatgttggctcacgcctgtaatcccagcaatttgggaggccgaggcaggcagatcacctgaggtcaggagtttgagaccagcctgaccaatatgatgaaacccccatctccactaaaaatacaaaaattagccgggcgtggtggcatgtgcctgtaatcccagctacttgggcggctgagacaggagagtcgcttgaacccgggaggcggaggtttcagtgagctgagtttgcaccattgcactccagcctgggcaacaagagcgaaactccgtctgaaaaaaaaaaatggaggtgagaataccgctcttccatgtagggagaaggtgggtgcaaggttacccctcatggatggtaaaggcctcccaatacagatgtgatcattgctgttgtcaagctctgggtcagtggaagatgttactgacctttctattttctttttttccataagttattgaggtataggtggtatttggttacatgagtaagttctttagtggtgatttgtgagattttgctgcacccattacctgggcagtatacactgcaccatatttgaagtcttttatcccttgtccccctcccactcttccccccaggtccctgaagtccgttgtatcattcttatgcctttgcatcctcatagcttagctcccacatatcagtgagaccatatgacctttggttttccattcctgagttacttcacttagaataatagtctccaatctcatccgggtcactgcaaatgctgttaattcattcctttttatggctgtgtagtattccatatatatatatatatatatatatatatatatatatatatatatatatggaatatacagatggaatatatagatggaatatagatggaatatatagatggaatatatatgaaatatatagatggaatatgtagatggaatatatatatataatcatagtttctttatccactcgttgatcgatggacaattgggttagttccacaattttgcaattgtgaattgtgctgctataaacatgtgtgtgcaaatatctttttcgaataatgacttcttttcccctgggtagatacccagtagtgagattgctggatcaaatggtagttctacttttagttctttaaggaatctccacactgttttccatagtgcctgtactagtttacattcccaccagcagtgtagaagggttccctgatcactgcatccatgccaaaatctactcttttttgatttttttattatggccattcttgcaggagtaaggtggtattgcattgtggttttgatttgcatttccctgatcattagtgatgttgaacattttttttcatgtttgttggccatttgtgtatcttcttttgagaattgtctattcatgtgcttagcccactttttcaagggattgtttgtttttttcttactaatttgtttgagtttgttgtagattctggatattggtcttttgtcagatgtatagattgtgaagattttctcccactctgtgggttttctatttactctgctgactgttccttttttcgtgcaaaagctctttagtttaattaggtctcagctatttgtctttgtttttattgcatttgcttttgggttcttggtcatgaaatcttgcctaagccaatggctagaaggctttttccaatgttatcttctagaatttttatagtttcaggtcttaggtttaagtctttaatccgtcttaagttgatttttgtataaggcgagagatgaggatccagtttcattctcctacttgtggctagccaattatcccagcaccatttgttgaaaagggtgtcctttccccactttatgtttctgtttgctttgttgaagatcggttggctgtaagtatttgggttcatttctggttctctattctgttccattggtgtatgtgcctatttttataccagtaccacactgttttggtgactatgcccttatggtatagtttaaaatcaggtagtgtgatgcctccagatttgttcttttgcttagtcttgccctggctatgtgagctcttattttggttcatatgaattttagaattgttttttctaattatgtgaagaatgatggtggtatcttgatgggaattgcattgaatttgtagatttcctttgtcagtgtgttcattttcacaatgttgattctacccatccatgagcatgggatgagtttccatatgtttgtgtcatctatgatttctttcagcagggttttgtagttttccttgtagaggtctttcgactccttggttaggtatgttactaagtcttttttttttttttttgcagctatcgtaaaaggggttgagttcttgatttgattccccgcttggtcgcagttggtgtatagaagagctactgatttgtgtacattaatcttgtatccagaaatgttgctgaatttttttttatcagttctaggagctttctggaggagtccttagggttttcaaggtaaacgatcacattgtcagcaaacagtgacagtttgacttcttctttaccgatttggatggcctttatttctttctcttgtctgaagaggagtggtgagagtgggcattcttgtcttgttccagttctcagagggaatgttttcaacttttccccattcagtattatgttggctgtggatttgtcatagatggcttttattacattaagatatatcccttgtatgctgatttttctgagagttttaatcataaagagatgctggattttgtcaaatgctttttctgcatctattgagatgatcatatgatttttgtttttaattctgtttatgtgtatcacatttattggcttgcatatgttaaaccatccctgtatctctggtatgaaacccacttgatcgtggtggattatcttcttgatatgttgttggatttggttagctagtattttttttaaggattttagcatctatgttcatcagggatattggtctgtagttttcttttttggttatattttttcctggttttggtattagggtgatgctggcttcatagagtgaattagggagggtaccttctttatcttgcaaaatagtgtcaaaaggatttgtaccaattcttctttgaatgtctggtagaattctgctgtgaatctgtctggtcctggacatttgttttgataatttttaagttaccatttcaatctcgctgcttgtttttggtctattgagggtttctaattcttcctgatttaagctaagagggttgtattactttttttttttttttttttttgaggtggagtctcaccctgtctcccaggctggagtgcaatggtgtgatctcagctcactgcaacctccgcctcccaggttcaagctattctcctgcctcagcctcccaagtagctgggaccacaggcgtgtgccaccacacccagctaatttttgaatttttagtacaccaagttgtactaagtgtacaccaagttgtactaagggtttcaccaagttggccaggatggtctcgatctcttggccttgtgatccaccggccccgacctcccaaagtgctgggattacaggcgtgagccaccgcacccggccaaagggttgtgtttctattttctaaccccagagggttggtgtaaagatcacatgagctcatgtatgtaaagtacttgtgagtcctcaataaacggtggtttttttcaccatccctttgctgctagagtccaaagtactagcatttttgtttttcttttcccttggggattctcagcagaagctgagaggcttagaaagtgtttttttaaatcccaaggaagagaattgttgattcctggagctgggcacagggaggctgtgagcagaggagctgtaataagatcactcaaaggaaactttattgttccatttaaagcacagggtgtctctctttttctttccctctcatgtatgcatttcaggcatttgacgttttgtttgtttgtttgtttgtttgttttgtttccttttgtttttgagacggagtctcgctctgtcgcccaagctggagtacagtgacgcaatctcggctcactgcaagctccgcctcccaggttcacaccattctcctgcctcagcctcccgagttgctgggactacaggtgcccgccaccacgcctggctaattttttgtattttttagtagagacggggtttcacggtgttatccaggatggtctcgatctcctcacctcgtgatccacctgcctcggcctcccaaagtgctgggattacaggcgtgagccactgcaccctgccggcatttgagttttaaaagtaatacatcctgtatcttcatggtaataatttaagcaatcccaggtgtctaaaatcccaataacattgtttctttctccccttcaatcgcacaccagttctaaactccagatgtaactaacggtaacaggtgtcccctgcttattctagtagtcataagcacatttacagacgtggagtggtggctatcttttgttctgttttacgaagaaaagcaaaggaaagatgagctagccgtggtggctcatgccggtaatcccagcttttcaggaggctgaggcaggaggattacttaaagccagacgtttaagaccagcctgggcaacatagcaagatcctgcctctacaaaaaaaacttaaaaattggctgggcatggtggtacatcatgcctgtagtcctagctacttgggagggtgaggcaggaggatcacttgagcccaggaggtcaaggcattccactccagactagatgacagagcaagaccctatctcaaaaaaaaaaaaaaaaaaaaaaaaaattaaaaagaaattactccaggggttccacagaacctccaaatgatatctaaagtctttaagaatgtgttttataggtagaatatctatagctttttcaggttgtcaaaggaatctagcagcccacccctccatcaaattaagcaccagccattttaaacttcctaaaaatcccaaacgtggagattagaccagattctctgaagtccctctactattgccatttcaaagaaaagctcttttttccctgatatgccacttactagatttctcttgttaactgatccttaagcatacctatacttaaggtatgaggtcctacgagatcatgaagggaaatctttatgcttaactgcaatagccaaaccttttccatgagtttattaaactgtagttattcagaattcaataatacttgtatatgctgcaaaatcattttatcaatcaggaaattgtattaaccccaaatacattttttatcatgcaatgagaggacaaaaacatattgcaagcccagataccaacaaagtttgaatgtttttccttttaggattacctacagataatccaggggtgaaagcatgtgaaaagcaaatctaatcatatgtctgtgtgaactaactaaataaatacacgcacgaaaccccatattgaaatctatatgagtgataaaatccactcgtattgcagtttagaaccagatgtgatgaaattttattttcctcagcaacagctcttcagttaaggggacacttacacatctgcttggtcatccccagaggatgcagttgtttttagatctaaagccaaatccattgaaattagctaggaccttttccatttggaagtgagaaatgaggatttttctcacacagttagctgatggggctctgctagcctgttgagacaattaacgcaaaatttacactgatataaaatgtaagtgcctctcatttattttttaataatcccatctaaaattgaccagattaatttttttacgggaaagaacactttcacagagaagaataatgaatgggaagactcagagactccaattcctattttttcttatgttttataattgaaaataactttagacttacagataagttctaaaaaaaaaaagtacatagttcccatatatcattcacccagcttctgctaatgttagtgtattatataactttagagccatcttcagaggcaggaaattgacattaattaaatcatattttataatttttctaaaagcaaacagtaccatttcacttttaacctatgtttgagagaaactgtcatatttgtctttacatattatgcacacccataaagccatcttctaaaaattcctttattccataggattttaaaatctggttagagggctgggcgtggtggctcacacctgtaatcctagcactttgggaggctgaggcaggagatcacctgaggtcaggagtttgaaaccagcctggccaacatggtgaaaccccgtccctactaaaaatacaaaaattagccaggcatggtggtgcacacctgtaatcccagctactcgggaggctgaggcaggagaattgtttgaaccccggaggcggaggttgtggtgagccaagatcgcaccactgcactccagcctgggtgacagagcgtctcaaaaaaaaaaattaaaaaataaataaaactgcggttagagtatcattcagctaaactgtctcacgggatttctttctcattttatataagaattctgaagatctgagcagcaattcctacaagcagctgcttggaaggcctgcatgcatttgacttattggggaggaaaaaacctcatgaccgtgtcaccttgtgtttatgttgctgatttaagtagtgaggcagcactttgaaaactgcaccacgtgtaactggttctttatcactaaatccaaggccatagggagtataacctcagtagcaggagccaagataaactgacttttgttcaagagtctgacattttaaacctaatcctcatattagctgtgcacaggcaagaagtgggtcttacttcatgtggggaatcctcagggtcatcccactgaccagccctaattgaatggaggccatgagtttcagaatgggctctcagcagctgcaaacatctgcaacagtctggttcagatgaacgagccccccgggttcacagctgcttgtgtccaccaaggccttgtggctttagacagatggttctgctctgaacactgaaagatgaatgtgcagcttccctgcttgctgccaggaatcatggctattcacaatcatggtccaaagttctctgaagccatttaatcgtatatgtagaagttggcatttattggcaagagtgggcaaacatcatctgctttgaaaagcaaggttttccctggggaagcagccgtcagagagatcacatgtattcctccatcagaacccatccagatttattgaactaggcatgatatggagatgttccaagatatttgttgctcctaagctaaatgaaagcttaagtccagccaacacatatgtcagtttttaaaatacttctcagattccagcactcgccttctgttcattgagatacctcaaagaaagctctttggaagactatttttaaatagcctcaggaaccagctatggcttggttttattagaggtcccctttcttccctacaccaaatctgcttctcttgcagaggtctctggctcacagttgtgctgagatttacccagttgctcagaaacttagaaaaatccttaatactttcctctgtcccacccctactttcaaccaatccttcaaatcctattgctttcactttctattgcatgttggatttcatttctcttcactgtcatttctgtaatcatgtctcaactggaatactggaacaccctccaatttttagattcctaacttcgctctttcccctctccaatccagtcccttcaaaatagccgagagtaagttttaaaaacaaatctagccacgtacatgtaactgctttatcagtgggcataactcgtgcagcaaccaaaatgcaactttattctttgtctcctgctatccctttaaagaacttattcagtgcagtggtcctccctttgttctttgataaaattcttgccagtgtggcttttctagtcactctcagttaatagtctatgtcactttaagctccacaaaaaaaaaaagtcccatttcagtaacgagaatgaaatggagaattcactccaaaataataaccttccaaaaataagactcctccctgtccctttgcccccgacctctctgctgtgctaagatctacaattgggctatttgcctcaggggaatggagccatggagatatggcagaattcctcctcagttcctcaacttccttcttctcccactactgactgctattttgggccctgcctgggtcaaagcatagggtgggagcaggagacagaagataggaatgttaatgttattacttggctgggcagatttgccctctctggtcctgtagatggctaaagcaaattctttaaagggtgcctttcattggagaatccatctaaatgaatggtccagcctggtccctcagcgtggtccatgttcctatcaactgtgacgtctcacaggtagagctgccatgggatatatacaccagtggagatgtgagtaaaccatcagagtgtaactcagaagtagacagcaataggctattgacttagtgaccagctataataagctaacccaccacggtcactgtttctgttcaaagcaggctggagtcgccttcattttcatcttgagatgatgctgcttaaacccccatcactgtcttctttctcttcctaactagaaataagaatgtttgctttattttttatgtatggctgtaaattcagaagacttgctttgggaaaaatggaacccagtgctttaatttagaaacaagaaaagggagagggagggaaggagggaggaaggaaaaccaaacaagagactaataactatagaaacaaaaagagaattgactcctggtactgagcatttcctcatagcactgaagtatagataaagagtatattgcatgaatgggttgagtgacaacaatccttttgaatccggaaaggtgggggctttgccacaaacaaccccacccccaccctttattagaagtctactaggaatctttaagatattgctctggggaagaatctccaggaaaggaaaggcacctggttaagcagctcttcctgctcgcataatttctagttatccctgaatgggggtaggtatggctgcctctccttgattttatcttatttttacttttttttttttttcgtcataagggtagatttctagaaaagcctcagtttgtttttgttttgttttgatcacctttgccccatattctccttccacacattatgtgaattatttcgtttctccttgttaatgaaacgaccctaaataaatggttcagggttaattaacaagcatcttctttttttatcttaattaatagactatctttttgagcagttttaggtttacagaaaatggagcagatagtacagggttctcacatgccccttcctcccacaatttcccctattattagaaccttgcattagtgcagcacatttgttataattggtgaaccaaaattgatttgttattattagctaaagtccatagtttacattagggttgactctgtgttgtgtatagttctatgggttttggcaaatgtatattgtcatatatcccccaaaacggtatcattcagaattatttcactgccctaaaaatcccctctgctccacctgttcatctctcccatttttatgtttatttatttctttctttgtttctttccttggcattcctcacatgtgagcaagacttcttctgtcagttcatttagaagacgtggtagtgcctcaaattttcaggacactttgcctaattctgatgagactagttaggaaatatagacaatttaaaggtctagaaataggcacagtgtgtgctctgatgatggctgtcctgatccagcctctcttacccgtctatggcctcactctggcctctgatcttcacactgtaatcccaagaaattggtacaaatctgcaagccctagctgaaacaattagatggcattgattcacctgctagatgttccttcttggaaatttgaaccttgcgtgggatgaagagagagctggagtcctcctctgcaatagtacccttccctccaaccccaggactttctcaggtacagatttcagactgagaaaacgatgtgccttttccctagaagaggtacagctaccaggaaagaagccacttattagggaagaccccatctgccatatctagggatacatcattgtatcaaaccctgttataaacatattatccacattataagaattctatgcatatatgaacaagatcattgcctcacagactcacagcagaaccaagtttctgctagacttccatattcgcattcatcatattgaatcacatatccacagatacaattttggacagccattaaaaatcatgttttcaaagaatagttaagacgtggggcaatgtttgcagtgtaaagttaaaaaataaagggatacaagattatatgtagtgtgattcatatagctatatagagagaaagataattcaatcaccaagtagattccttctcattttccagattttctacagtgagcattattaattttataatcagaaaaaaaaagaataactttcattttaaagaaagtaacactgatctgtgtggtgaccattctggggatatgtgtccagcctgaagaccaccaagcaggccccttttcattagcaagtgttgttggaaataatggagaggcaaagcacaggtcaaagcattaaccctggagtggtcagcttgcctgtgcttaactccagaaagatgcaaaatatacattcatcacaggaacaactgagctcttacaaggaaagattttccagaaactcaaggaaaaaaaaaaaatcttttctaggcaatttcctagctaggtgcaattttcttataggtctatctaaaaacttttgaaccgggtgactcaaatttgtcagtttccaatattcccatgccatcatcttcatcagactgaattcattacacttgtactatcctgactgtgcatttaggaataaatgaccccattgggtaaagaatgagctgaggtcttattaaagctggcatctttatttccctaaatgtcatactcactttgaaatccactgatagaatgaatgggggtgtgctctggttcccaagagccctcaataattggctgctgacttcttgttcttggatcgatttcttctaagttcaaacattttttaaaaatttgtttctttagttgtaaaataaatataacataaaacttaccattttcaccatttttaagtgtacaattcagtggcattaaacacattcacagtgttgttcaatcatcaatattatccatttccagaactttttcatcactgcaaactgaaactctgcatacattaaataatgactcttcatccccacccctccctctcagcccctgataacctctattccactttctgtctctctgaatttttctgttctaggcaactcacataaagataaatcatacaatatttgtccttctctgtctggcttatatcacctagcataatgtttcgaccatgctgtcataagtatataatttcctttttaaggctaattaatatttcattttatatatataccacattttgtttatccatttatctattgatggacatttgggttgtttctgccttttggctattgtaagtaatgctactagatgaccattgaggtacaagtgtctatttgagtccttgcttttcaattcctttgggtatatacctagatgtggaattgccggagcatatgataattctatgtttaactttttgaggaactgccatactgttttccacagtggctgcaccattatacatttctaccagcagtatatgagggttgtgacttcccacatctttgccaatacttgttatttttttatcttcttgatagtaaccattctaatggtatgaaatggtatctcatcatggttatgatcaaacattttaaagaaaatctttctgtgtggctgtgatcgtctctgaattaaatagtgtctagctctggggccaagcagctttgggtttaaacaccagaaggaagtcagctccacaagggaaggagctttaggctgttttgtgcaccaacatatccctgatccatagaacaataactggcacgtagtaagacatgaataatatctgttgaatggacggattccagtccatcactttctagctatgtgacctaacttaagttccagttttcttaactatgatacgggaataaagacagtgccagctgccaaggttgtgtgaggattatatgcaataccacccacagggtacttgtacactggttggcacatagtgagcactctgtaaatggtagttggtatacctgttatgactaagcaggaggctttttatataggctaatactgagccttgatctgcaggagaggggtgagttcctcaaggcaggaagggtgccatgggttcagggatctggggcagctttcatgctaagccagagctttgtagcaggaaggaaggggaaatactgcaaaatccattaagctcagagctccccagagcaagtgtattccctggcaataacgctggggggccagaggcgggagaggagaaccaggagttatgttctccatcagcccaaccaccaggaccttaagcagaataggcacagtgaggttacagcatgagggccactcagtgaggattaatgcccagtgattgatggtaggtcctgtagctacagctactgcattctttcaagatgcaaaataatgcactgggaaaatgtagcttcatgtaaccaaatgttagtggaatgctaatgtcccaggtccaagaggaagccaactgaaggaagtcaaagttatggatttccccctttgctcacatgttggtagaaaatacgtgccccatctcagtgcagaaatatagattcatgggaactcagacaggctgaagattaagtctaatgaatggatgctagatagtgtcaagcagatttttctgaggaagcggaaatttttactttcactcccaatttccctgcttcatcaactccacagagcttgctgagtgtttcagacgtggtacatgcatccttccagtagctgagtcacctctattgtatttaaaccatgcagctttcatggggtaaaaagtcaacagattttactctgctcatcacattatttcggaggcacatggtttgttgtgagccttctgtgtcagcctcggccagagattaggaggaggccctggggcatcagtgagccattgatgtcccaagcatcgggctcagtggccagaaacagtctctggagatagaaaggcctgtgaggattcagtggagataccagctagggcaggtaggaccaggtctcaggtccccagtatctgaggtgtgatggattatcaaagaatgcagagcccaagttttaggatcagagccaaaaatgggggaaaaaactgaaggaaagaaatcgagaggaagcaatattaggagcaaatagacctcccaaggattctactgtcttgccagagacaacactgggaagcctctctccaccttcccagtgcccagatagcctctccttcataagcctgggagtttctggtttcattttctgcagaagagataagaatgaccagtttccttggagcagaaggaagtctgcatgggtggggaagctggcctggtggaagcccaggacttcctttcctaccttatcaccactgcttctccaagaagagaggaaggaaggccagtactctgggccctcctgcccaccataaaatcaagctctccatgccccaggggttcatgctctggcctgaatccatgcagactactggaattccatcaagcagtgagtgtgaaagattttctccacacttctgagtgagttgcttcctctccctttgatggaagactcaaaccctctttataactaaataaaacccataattataattctgtggtaacacttctgtaaacagtagcttgagatgaaaagaacagctccagaatcacaagaaatggcagcatccacagccacgtctgggaatggttccctgatgttgtgctctaaacattttttctaaactcagatggtaaatgcaggatgcttcagtctttcctagacctcttaggttacacagagtggggctgaaatcttactcaagaaatctttgggccgggcgtggtagttcatgcctgtaatcccagcactttgggaggctgaggcaggtgaatcacgaggtcaggagttcaagaccaacctggccaacatggtgaaaccccgtcgctaataataatacaaaaattagccaggcatggtggcagctgcctgtaattccagctactcaggaggctgaggcaggagaattgcttgaatccaaaaggtggaggttgcagtgagccgagatcatgccattgcactccagccagcacaacaagagcaaaatccatctaaaaaaaaaaaagaaaaaaagaaatcttggccagaccaatgtccttgagcatttccccagtgttttcttcaagtagttttatagcttcaggtcttcgattaagtctttaatccattttgatttgatttttgtatgtgatgaaaagagagagagatctagtttcattcttttgcatatggatatctagtcttcccagcactatttactaagaagactgtccttcccaatgtatgttcttggcacctttgttgaaaatgggatgactgtaaatgcataaatttacttttggattatctattctgttgcattggtctatgtgtctgtttttatgccaatatcatgctgttttaattactgtagctttgtagcataatttgaagtcagtgtaatgtgatgcctctggctttgttctttttgcccaggattgcttcggctattccaggttttgtggttctgtatacatttaaggattatttttttctttttctatgaagaacattactggtgttatgacagggattgcattgtagctattgtaaatgggattactttcttggtttctttttcaggttgttcactgttggcatacaaaaatgatactgatttttctatgttgattttgtattctgcaactttactgaatttcttcatcaattctaatagttttttggtggagtcattaggttttctaaatataagatcatagcatctgcacacaaggctagtttgacttcattgttttctgatttagatgccctttatttctttcccttgtctaattgttctggctaggacttccagtactctgttgagtaaaagtgatgaaagtaggcattcttgtcttgttccaaatcttagataaaaactttagtttttcctagttcgatatgattctagctatgggtatgttatatatggcttttatcatgttgaggtatgttccttctatactcaggttttgagagtttttatcatgaatcaatgttgaatttcattgaacgcttttctggcatcagttgaaatgatcatttggtttttgtccttcattctattggtatgatgtatcacatgtattgatttgcatatgttgaattatccttgccttgttgaactcagtttgctagtattttgttgaggatttttgcatctgtgttcatcaaagatgttggcctatagttttctttttttgttgtgtctttgtctggttttggtattagggtaagacctcaaaaatacaggcaactaaagcaaaaatggaaaaatggtatcagatcaagctaaaaagcttctgcacaacaaaggaaggaaccaagaaaatgaagagacagcccacagaatggaagaaagtatttgcacactacctatctgagaagggattaataaccaaaatatataaggagctcaaacaactcaattttaaaaacctaaataatcccatttaaaaaatggacaggttgggcgtggtggctcacacctgtaatctcagcactttgggaggccaaggcaggctgatcatgaggtcaggatttcaagaccagactagccaatatggtgaagccctgtctctactaaaaatacaaaaactaaccgggcatggtggcatatgcctgtaatcccagctactcaggaggctgaggcaggagaattgcttgaactccggaggcagaggttgcagtgagccgagatcgcaccactgcactccagcctgggcgacagagcaagactctgtctcaaaaaaaaaaaaaaaaaaaaaaaaaaaaaaaagacaaaggttctgaatagatatttctcaaaagaagacatacaaatggctaacaggtacatgaaaatatgttcaacatcattaataagcagagaaatgcaaactaaaactgcaatgagatatcctgtcaccccaattaaaatggcttttatccaaaagaaaggcaataattaaggctggtgaggatgtggagaaaagggaaccccatacactgttggtgggaatgtaaattaatatagccactatggagaacagtacagaagttcctcaaagaactaaaaataaaactaccacatgattcagcaatcccattgctgagtatatatccaaaagaagggaaatcagtatttgcacccccatctttattgaaccactgttcacaatagccaagatatggagtcaacctaagatgagttataaagaaaatgtggtttaattagccaggcatagtggatcacgcctgtaaatccagcactttgggaggccaaggcgggtggatcacctgaggtcaggagttcaagaccaacctggccaacatggcaaaaccccatctctactaaaagcgcaaaaattagccaggcgtggtggtgcatgcctgtaatgccagctactcgggaagccaaggcaggagaatcgcttgaactttgcagttcaagaggttgtagtgagctgagatcgcaccattgcactccagcctggtgacagaacgagactctgtctcaaaaaaaaaaaaaaaaaaaaaaaaaaagaaagaaagaaggaaagaaagaaagaaagaaaatgtggtttatatgcacaatggaatattattcagccatataaaagaatgaaatcctgtcatttacaacagcatagatggaggaaattatgttaagtgaaataagccaagcacagaaagataaatagcacatgttctcgttaatatgtgggaaccaaaaagaaaaaaaaagggtagtcatggagatagagaatagaatgatggttacccagatggaggaaagtataatagggagggggagataaagcgaggagggttaatgggtacaaaaatacagttagatatgaggagtgagttctagtgttagcacaatagagcgactatagttaacaataatttagcatgtatttcaaaataactaaaagagtggaatttgaatattcttaacacaacagaaatgatatattcttgagttgatggatacccctattactcttatgtgatcattacacattgtatgcttgtatcagaatatcacatgtgccccataaatgtgtacaactattatgtatccataacaattaaaaatttaataaagaggccaggcataatggctcacacctgtaatcccagcactttgggaggccgaggcgggtggatcacaaggtcaggagttcaggaccagcctggccagcatggtgaaaccctgtctcttctaaacatacaaaaattaactgggttcgcttcaacctgggaggtggaggttgcagtgagctgagattgcaccattgcgctctagcctgggcagcagggtaagaccctgtctcttaaaaaaaaaaaaaaaaaaaaaaaaaaaaaaaattagtaaagagccagaccaagcattaagcagtttaggagatagagataactttagtgtgtttctctttgggatcttaacaactttttccttttcccttctccctatatgtgcatatttgtggttcctgaagcttaaataatttaaagtaactgactttctcctaagtgtaactatgttctacctttcatactttgtttctccttatttgttgtcaaaagcagagagaacattctcctcccctaaatgtgacttcaatctaaaatccagagatataaactggccattacttgaaatgttaaagacatatgtatggctaggttaagtcttcctttcttcactttagttcttttttctgtcttcttgatcaatccagcccaggatctttcctgctttcctagtggtcatcagagccagtggtcatcagagccagataccaaacttttttttttcggtccatgactagtctcccttttaacctgcttccctgttgggaaggttgaatgtttggtgagagatgcagggagtcaacttagcaggctcttaggacaaaaattgtgttaaggagcatgagccatatacagtaccatgggagggtctccaacagctaaaggctcatcgcacaattgcaagctgttggctgtctctgagcagacaaaagccagcagacttctggaagctacacattacaaccctaaattttcctggcttggcaggctgcagttcagcactttgcctctctcactttcctgggaggcccacggggccaagtgaaccctgatagtgtccacacaacaccaaagggcctgctggaaacatgaaaatgaaggcagtccccatttggtgttttgtgatagcaattaccaaaaacaagtttcatagcaatttttgttaacttagtggtctcattagactttctgtatatggacttgaaatttattcattcatttacttgctcactcattctttcctttaatagacatttatcgtgttcctattgtacaccaggcaatgagataaaggactgtattgtctataattgtccccagatgtaggcagtacagaagaggtatctttgtcatcatcattatccacattaattcattcaaaaaatacagatagaacaccttctatctgtgaagtgctgtgccgggcattgtgtgggaatcaagatagaccgagtccaggctctcatggagcttgcattttaatgatagaaacatataaatacacaactataataaaggtcctctgatcgggggagcatataacattatgacctgcctaatttttaacttcatgtggttcaaccaaatgtttaccgtttattgactattcctcatatgccagacacaggaatatgtgctttataagtgttacagttaacattcccaagaactctgcaaagttgactttattatttccattttatagatgaagaaactgacacagagaagttaggtgtatttcccttggtcacaagtgctaaatggcagaactcagtttatttgactctaaggttctgtgctgtattctctacaggacagaaatatctgcacattatgcgctaggctgttggaagagaccagaaaaaaactagtagagcataatacccacctagtatgtggagtaatggatgaaatgaagtttagctcccaaaattgttgtggttactcatgtttcaaaatctgatttcagataggagacagatcagtatgtttgccataagtttctaacctttgcttacctgtatgtttttcttttgctttccttgctttgaagttctttaatgattttatttcctcattactttattaagaagatttaacttttgatttctagatgtgctccattaggtaccttggatgttagcagatcagaagactgccacagccaccagggatgaagggtgaggcagaaatgtacttgtagggcaagttttttaaggggtaatatacctgtggagttgtcagtactgcctttgacctgtttcagatcatctatctttgctcacagacccagatgagggtgcctttgtctgtgtgatcccacctgtcgttgacacaggtcccacctccgtggaccagggtggacactgacttgagacagtcacgtgacttgtatgtcacccaaaaggagccctgggccacctacagcccctctttcaggacttttgcactaagatccagagggaagttgttagtcgtgagccattgaatcgaaaagtcacagggtccaggctgagggtgccagctggggctcatctatgtgtcaaatgaggagggagtgaagtctcacagaatgtgaaacagaagggaatggctccagggagtagagtgaggcagagaaggcagaccgcgtggcccatgctggaaaggagcacccggcccctgctcttcagttccctggcccggttccattgctgggcttcaccttctgctcttgggtgccatattctatcactgtaaagcccctgttgccttccgtagcttgaactggtttctggtccttgtcatggacagatcaaaacacaagttctcaagcagataaaataatttgtatcacaactaaatggaaatgaggaaccttgtgatgtcctacttatgggtctcagatacttttgccttctccacagaagcctaagctagatatttaatattctctccttgaagaaatgctaaaagaaggactagaaagcatctaagaaaaactgccccctttgagtgattgtcttaaacatttaatgtaacactagaagaaccatcataaaaggccagtggccatccctttcatgtacgttaatggaccttctctaagtaggactttgtgctagatataggtagataaaagtgagtgatgtcacacctgttcttgaagtgttcacagtctagacaaataaatcaccacataatgtaggaactactagagtagaaatatacaaatgttcctctgagaagggaatgattcatttcaatttcacctgaggacattagggaaggctttacctaggtgatttttgagctgagtcttgaaaggtaactgtgtgcctggcagtttgggaaggaaggagggaggcaggccctccaggcaaagggaacaggatgtgcacagctaggcgggcataaaacagcctgttgagctcatggaactgagaggaggtcaccgcaatggggaaaagtgggtgcattgggtgaatggcaggaataagggtaggttgaggccaggttttggagagctgtatctacaattaacaatacaatcaataattactgtaagtattattattctctgtcacagacaaagtaagttatttatatctatcattctcatttgtcaaggaactgtgttgtggacaatgtccaaacaatataaaggctttaaaaacactttttgggaatgaggattctgagagcagtttgcaggagagactgatgtaaggggcagtgaagagcagagaggacaggcaggaggcagctgtaatttccaggggagaagtaagtacctgatttaaggcaggggctgtgggatcgaaaggagcagttgggcttgagattacacttctgagggattcatatttagatatgtggagagaatgaaaaagaacttcgagccgggtttgaaggtcttcctccaggaatggagtcagtagtgatagcactcactgagctatgtggcacaggattaggcacgtgtaggaagatacgatctcatttggggacatattaaatttgagatgctaatacattttcaagatagagaagatctcttggcagtcagggaaaggagtctgaggcttggaaaagaggttaagattgaatatacaaatttgggagtttatatcactctgtccttcagattagcggatgggttcagagacgtgcacaagacagttttcaagatttgtattaatggaagggtctccagaccccatcagtgaaggtccacctgggtgtctgaaatactctaaaacagttgttcagcaacttgcctctcagccaagttcctggagctctaaccttctccccagtgctttctgttccctaacagggcaaccaggtgggaatgagctgagtacaggatgctcactggccccaaagccataatggtctgaaatttggcttttgcatttccacctgcccttgtgtgcttcgtcgtctcctctcttgtactgcccagtgtggcacaggtatgccatctcttttatttaatagcctatttgcagtttcagatgaggcatagccttcctcctgtgattaattcagggccccactgggaagtgggataaggcacctgcctcttttgctggagggtattttgagagctctataaatttgcatcttgagtttatgaaagagagagatagggaagaatggaatgtcattcatgcatgataatagtagatctcatgtgggcttggtttcctcagagttttcctcacttaactaagaataatttatttgacctccacttggggactcaatattttaaatatttgaaagagtctgtttcccacccccctgcccccagaactcaggttgactgctaaaaaattgccattttgcagattaaaaaaaaagtagccacccatcagcaattgcatatagtttcagcctactagcaactagagatggggatgcctaggtgaaggtgacaaattgtatataccttttgagtaatttgccacaacagtccctggtatctctcttagtaaattcagattatacgtgacttttaaaaggtatcacagtatttgattatatgtaactatttatagaaatacttggtggtattacatggtcagtatttctgcgtcacagtggtttctgcatccctgacatgggttccacactcacccagtctctggtaggtggtacatgcactgcttgcttttctactcagctctttaagtctcaatcatgacttccaaattagctcatgtagtgatcctggtttgagattctccatgaagagggaatgaaagacctaatgtttattgtgcacacctgctctgtattagactctgtgtcaaatgctttatgtctactgtgatcttcaattctgagtaacaaccttacaggtaggaattattatcttcatttttataactaaaaaaagaaaaccatgaagactctagattagataacttgccctaaattatcaaggagatagttgccattggttagttcttgctctgagctacaaaatcctccagagcaaatgttatatcctgaagggaagaaggcagtaagtgagatgacgatccttctgcccagattgggaggaggggtacatttcaggagacatctctgtcccactgtgtgacattggattctgtttctccacaatgaaatgaagataacaacacatgagctcctccccgggatgctgtgtgattaaaggtaaatttgctttaatttctactgaggtaacccagaatgctgatctgggattcctgaagaaggcatgccataaatttatctttggatcctctatcaaaagacgggagacttgggtaaaaaatttatcagtggcctaacacaggttcttaactgggagagatttggagacatctggccatgtctagagacactttttggcccctggcatctaacgggtagatactactaaacaccctgcaatgtatgggacaatctctcacaacaaacaattatttggccccaaatgtggattgtgtgagattaagaaaccctgatctaaagagtacttgcagagaaattggtttagccgatctaaaagagcaagttaattccacaaactatcaagtactttggaaggatttatttgtacatagaagattagtatattatgaattataaaatatttagtcatgaaagcaattcttgggagggaacttctgttattactagaatcttgtgagggttctatgaactaaaaaaatagtatttaaataaggaaaaagatgtagtcaaatttcacagatttgcactcattagagccattggaggaggtaattactcagaattagtgaacacttcaaaatatagaggcattattggtttattcccctgtaatgtgttgctttatataataatcagtggagagcctattgatttgcatttatttgagagttgttttctatgtattaactctatgctgtggttcaatagatgaaaagccttatattaaaaggggctgttaatatagcaatcttgatgatctttttttttttttctctttgccacttctgtaaaactcataatcgtagtgtctcatcttaggcctgccacatgacttggaacgattgagttatggagaatctctgcacctccgtatagaagaaatagtatgaggcatttctcttgaacagcgctatccttcttcctgcattttccctcttccccaacttctgttgaacaaagaagaaggactgtcttgtagatgttactgtcctatgacaaaggtcttttccactacacaaagaaaatttgcttggaatgggcccaaaatattatttccttaaaagctgctcaaaaagatgatgaaggcatcttaccaaatatcaggagattgtattctagtttgtccttgatttggtgtttggccttgcacaagtcattaaatgtctgtcctcctttttccttactgtaaaatgaagagggttaacgtggatggttaaatgcgttaccattttgagattgtaatagctaagtcttagggcacctaggatgctaaaattaacattttgctcagccaaaaatcaggctgccttgagggtaaatgaattttatggagacactgtgatagttaagaagagggctgaacttattagaagagacatgatgtcatccttattcacagactggaataaattctgccatattcagtggggaaggagactaaatttagatagtcaaggtgaaatagtggtagatagtcaaggagaaatatgggaaacataaagtagtaaggaaatatgattagaaaggaagaaaaaacaaggtacatatcatttagggctccttggttgcaagcaacagaaactgactctgactaacctgagtaggaaacaggatttattagaaagaaggtgacctcagagtcaaataatgattctggtgtgtgtgaattggggtggataggagtgggcttggggataaccgattggcaaacttgccagagccccagtgactgagggagcagttcccccagggacgaaagctatgaatagagaagggggaaaaggactgctgaatataaaaaataatacaagaaatataaatatttcttgaacaagaaaataagagaattgcctcaacctactgtcagtgatacatctgtttgaagcaaaagaaaatgtggtttactattttggagaaggaaaaaaatacatgtagggaaagtgtatcaggaaaggaacctgaaataaatttaaccaaattcatttattcttgagcatttttagagccctcccccacacccctaccttaagtggccaggcaccttgtgctcagtatccaaaaaaggtaacataacccccgtcctcaaagctcccagccagtaacacaataattgtgatttcctcactttttgattgttctgtacatgccaagctgcttgctgagtgctttaaaagcatgtctcatttaatcctgcaagtgctccttgaacgagtcctattgttatctccattgtgtagatgccactgaggagcaacagaatgagcctaaagttagaaagcaaatcaggctgagcctgactcagccctggtcagcttggctccaggacctgggctcttgctaccgttctgtgttgcctttcttagcaagtagaggaggaaaaagaaaacagaaacacaaaggaagggacaacacacccatatggtatctcctgttattgactagatcactgagcgttgcagtatttaaggattgaatcacattcgctccctgttgatgcctgcaataagttattaaaaacagccatgcacaatcagtgagcaggctagcaactgttccaaagcaggatagaacctgcctctctctgtctggggcataccaacctatcaacagtctttttttttttaaaaaatctatttattatttaattggcaaataaaaattatatgtatttatggtgtataacatgttgctttgatatatgtttacatcgtggaatgattaaaacaagctaatgaacacgaatcaactcatatcattttttgtggtgagaacatttacaatctagtctcttaacacttttcaagtacataatacagtatatgcattaactatatgcaacacagtatataacacatcttcagaactttttcctcctaactgaaactttgtaccctttgatcaatatctccccgcttcagcggtcttttgatgcttctacaacaagacatcccgacttaatgactccacagatgaccttttctccaccccccaaacaaagtacagatttcatgtctaaattttttatcctaagccaagataagaatgttattgtctcttctgtgcctggacctctcatcagcagtgaatggaaatctcaatgattaatacaatattttcaatctaatagagctgctggctcacagccacttgtcttgagacatctcactgtcaaagcatgactctcaatacatgaaatatacagtgggcatcaaactatattcccagcttttaagataacatgattttctccttttctatgttttactaatttttattaaaaagtatgtttacttttacaatagaaaaaaaaaagtcagttaagaagaatgcctgctatgctgtggttaatctaaagttaattacttctctgccacctactcctttgtttataaaggactctattgtaggtgctggaagcataagtaggtgtgaccgtcaggttcctatacactaaatctaaatttgctgcctactcactggcattttgtggcttttgtaccttttcttcaagcctccttctggacacagtttatccaatggctggtatcatgtgggtttgtcagtctttatagctcatttgggattgcttcttttggtagttctgtgttttggaactctaggcctctgcttttgttttcttttccttcaaatagtcattgaagtccagagtgttggcagtgacctttgaaaatgtttttacagcttacagagacttcctgacatgttttattagctcttggtggtagctaataaagtgagtcttagcaaagccgtgtaacatgacagattagagccacttccaaaataaccactcaccagagttatcttgaaggaggcttgacgacaggatatttggctaccgctttctgtccagttcagcagggcatgtgtgattacctcttgaagaagggaggtcattcctttaggaaatacagtgaccaacttatgatgaaagaaccacaaacactgagagccccctgcaccagtaaaacagagatgtgattgctgtagggattgattaatgagttattccacaaaacttttgcctcctaccttcacagagttagaatatgagccaaagctggtcatctaccttttaagaggaggaaaagaagtgaaaacaaccctccctgaacactcatgagtgttcaataagatctctcttttctatcttatctttatttttatttttttacttggaggagtggtttagcaaaatgacatggagtttggattctggatttccacagatctggattcaaatcctgcatctgccattgatcagctgggtgatcttaagcaagtgttcgcttaagacttggtttcttcatctggaaagtggggataataatcgaaggtttgttgtgaggaataaaatgtggccaagtctgtacactgcttagcacagtgcttgacatgtaagcactcaaagaatgttagctatgaagttattttcttaaattccttgcagagccatgtgtgaactctgtttgtagaataatatttatctatatgccttcctccacccaggtctaccattttgcacaactccttgggaacacaattagcaatgggacatcattcacatagaatacagtatcgatggtgtccttcgagttccacaacagagcaactacctcctcatcctccacttcctcctctctctacctctctctgttacacacacacacacacacacacacacttctctgcaccctatataaataatcatgcacttctctgcaccctatacaaacaagctttttaagttatttttgtgccctctacaaataatcacctggcctatatttactttggggaaataacttcttcataaataggcgtaacagaaaaagcagaactgacctagacagccttttaaacacctatagcaaggatttacttgtaccctgtgcattttgtgacaaacaaggtgtagaactgctatttcagatagtcagtaatagccaggtattaagaatctgtctaatgtgaaactccgtcagaatctaaagcaagagaaaaaaagctaaaaataaaatgctagggacaatcagttaatcagccacttttcctcctttttatctcaagcaacactttgtctcaagtctgtctcaagtccaacaagggtcttagtagattgtaaatccatagaagacaaaaccagggaatgtggacattttttgagtcccttctgtatgtcagttgattaatccatgtaaggtcattaatagtcatgacgatgattatctttattttatagataaggaaaccaagaccaattggttatgtaagtgatgcccaaatcacacagctagcaagaggaagagcttagaattgacttttttatctttccaaaacactggtctctccactgcctgagagcttcccaagtatcagagctccattcatgaaaatgaataggacaggacatcaaatggctcgtctttattcctacagttgttcatgtaaaggattgtcttttattctgggattatagctttcttgttttttttcttttgtggtgcaaaaatgcccttttatgaaatgagtgagagttagtgagacttttttaagtgcccttttggcaacataaacgtaggcgactttatgttgatccccttgcccaatttttaaaatttcctggattttgaaacccagaagtctagtcctactacggtataccattttgctttcctccaaatatttgcagatgttttaaacgttctctttgcattatagaatactcttacaacctaggggcctgctatgcagttatttctcattaagcttcaatgatgttcaagaattacctgttcccacatatgataaagaaaacttgtttctttatttgaattccaccaaaaaatggttctaaataagaatcctctagaaaatgtattaaaatattagattctggagccctgccctcaaagattgattcagtagttctgggtgagacccaaatttggattttttgcaagcctctgaggggattctgatgctgcttatatggggatagtacttccaggaactcttatagaaaggcattgaatctgatatgaaattatctctcctctgcattgagaattctgtatttttgccatagagacttatagaggcatggcatcatgtcaagctcaattttgtgaattatatgagatttctacatctatttttggttaaaatactggagcagaatcatcttatttgctttaagcacttcctctcaaaatcaaattaagtaaaattaatctcttcgaagaaaagcattctctaaatttgaagtcacttttatgcttaactgaacatatgatacctccaagctgaatcctgggcccgtcagggaagtctgagttccgtatgtgacatcagttggttgctatggaagtgtaggctgtgctataaattccagctccacgcagatttctcttgattgcaagtcaattgagaatgatttgtaattttttggatcacactcagagatgctatttagtgtaaacacttactttcattaaaatagtttaataattgatgtctatggtttccaaacgttttcagcatcacattttgcacatgaatagcacacttccaacaataacataactcattacatgacgggattattgacccaagagaggtgaatcagtttatccaggacacaaaaataacttaaaaagctctgcccccttcccctagggaccttttaagctttacccaccacacccaaccattcatttatataaataaacttcaccaagatcagatatactgccaatattttaaaaagaagattattactgaagaatctgctgaggtgagaggtaggcagtcgcctctgaataggatgtgctcagccaaacaccatcctgtgaacgtggtacatttaaccaaagctctcttcttcccaagacctcgtttcagaaaagagtaggtgtgagtaaagggttcatgcctttgcttctctacttctctgcctgactaactcaaacttcagaactcctccaggattttttctgatttattctgttcaggctgctataagaaaatgctgtagactgagtaacttgtaaacacagtttctcacagctctggaggctggaaaagccaagatcaggatgccagcatggtcaggttctggtgtagactgccagtttctcagtgtgtcctcaggtggtggaagcggggaggaagctttctggagcttaaggcttttataagggtaataatcccattcgtgagggctctgctctcatgacctgatcaccactcaaaggctctacctcctaatatcaccttgggggttaggatttcaacatacaaattttggggggactcaaacattcagtccattgcaccctctgattccttcaactgggttaagttctccgcccttagtctctcactgctgaactccaatacatatattctcactatggtgaaaggatttcgccctgattgcaggctctgtgatcagacagcctggcttcagattacctgtctgccagttaccctgtgggaactaaagcttatgaaatgttagcagtgtctggtacataaataatattagcaacttggccgggcacggtggctcacgcctataatcccagcactttgggaggctgagtggggaggatcacttgaggcctggagttcatgaccaacctggtcaacatggcaaaaccccgtctctactaaaaatacaaaaattagccacagttgtggcgggtgcctgtaaccccagaggaggcagtgagcggagatcgcccactgcactccagcctgggccacagagtgagactcagtctcaaaaatatatataattagccaggcgtggtggcatacacctgtgatctcagctactcaggaggctgaggcaagagaaacgcttgaacttgggaggcggaggtaggcggaggttgctgtgagccaagatcacaccactgcactccagcctgggtaacatagcgagactccgtctcaaatatatatatacacacatatatattttatatatatatatgcaactattgaaatatgatttaggaaattggtgatttaggaaattggtgtacttctactttcattccaagtaacaacttttattttatttttatttttaattatttttttagcagatgcttagagtggagggttgtgaaaaattcagaggccatatccaggattaagagggaaagactggagatcaagtggtgatgtctcctcggtctcggtccaggctggaaatgggagctgtatgccacatattttctctttctgcactagactaaaagtgacttaaaagtgctaattcattcaggcctttaatttatttactactatgtaccaagcactgtggtttccatagcatatacattaatgaataaaacagacagagccctggcctcagggagctaatggactagtgaaagaaccggataatcataaggaagctagaaaataaagacagaatacaactagtgatggggagtgctgtgaagaaaaccatgattatagccacaaagaatcgagggtgggtcagaaagctacattagaaaaggtggtcagaggaggcatctcaagagagatgggaaaagtgtccgagcagtgagaacagcgcatgccaggacctgaagtagagaagctctcggcatgttcaagtaattggaaagaagcccatttggctgcagcgtaatcagaaagaggagtggaatgaaacggtggggtcgcagggagataggcaggaggcagagcacataaagcagtggttctcagcctcaagcatgtatcccaactccccagagagcttgtgaaaacacagattgctgccccactcccagagtttctgatccagtaagtttggggtggagcctgaaaatttgcatttctaacaagttccaagtgatgctgcaggtctggggaccactctatgagtactcctgatataagcctttttcagtccacggcaaagggcttggattttattggaagcattagtgggataccatcaaaggaggtcaagagtgatagctttaattattatttttaaaatgattactcagaccattgtgtggagaattcattagaaattgtcaagactaaaaatggggaggctattcagaaagttgtttacagtggtcaggcgagggcagtggcagtagagggaagaggaaactttcaagatgaatttaggagtggcatcgataggatctgcctgtggattatggaatgggtagggaagaagacacggaggatgttgactgggtttctggcttgagaaagggagatggccaaggcacgtactgagatgggggagattgaaggcaggaacatgcttagaagggaaaggaaaagaatatattcaacatgtgttagacaggttaaatttgaagaatcatctccgaagactcagagcctaataagaatgatacattggactttggggacttgggggaatggttgggggtggcgaggtataaaagaccacaccttgggtacagtgtacactgcttgagtgataggtgcaccaaaatctcagaaatcactgctgaagaatttattcatgtaaccaaacaccacctgttcccccaaagcctattgaaataaaagagaaaaaaaaagatactctgagcctagtatatatagacatttcaatgagtgaactaaaaataaaggtaataaccccctggtcagtgctaatatgaaagctgtatgggtgcttggggaccaagccagctcctcagcctctgtctctgggagctgagagtgcttagtaataaatcattgctgcatcaccagagtagcctcctacataaatcattttagacgcaaatcagtcacctttggaaactagattagctcttgggtacctggaagttaacggtatgtgcaacctaaagtggaagctcctttggaaacaaggtttttccaaggtttatcctaacactgggtttttaaactttggtactattgatgtttgagctggataattctttgctatgggaggctgtcctgtgcattgttaaatgtttagcagtatccctggcttctgcttgccaggtgccagtggtagctgactcccaattatgacaagcaaaaatgccttcagccattgccaaatgttgcctgtggggggcaaaatcatttctagttgagaaacatggctgtaagaggactctgacatgttaaccccttgtggtaccccttgctgcgagacaaactctcttctccatttaatgtactgtccttgttttccatcctagcctctcagagcctgtactttctgtctttcaaggtgactttcaatccatccgaaacgttaatccaggtcagtggtcaaggagatgctataactctaaccattttctaaagaggatatctctggccttaaaatattcccatcagtgttggtgatgcagggaactttagggtatcctggaggaggaagaatgtaccaggagaatctgatggtaattatgataatgataataatagtagttgcagcagctaacatttatataggaatttgccatacatagtctaaatatttttaacatattagcttattgaattccttatagcagcacagtgactttggcactattattatgattctcattttacagatgaggaaactgaagtgcagtgacctacccaagcttacacagggaaacagcaaagctgggttcagatccaggctctttactatttccaaaagagggataggcatctgatgagagaatatggggcaggtgtgtataaaatggtctgcctgttaagactcatcacctttaatccttaattacacttgtaaatttaccaagtcccttcagtagaaaatccccacagaattttagaaatcatgattcctacccatgataaatattttaaatgaatgattattcatttattcattcatgtctcccctttcattctgtttaaaggaggcatccaacttcagttttctcagcaagcacacatttaggccacagatttcattaagtcacagtgattcattttcacaagcttgtaacttttattttggtacgcagaagcaactctgccacattttgctgctatttccagagttcacggagaagccaacacaaacatttgcattactgtggcaactgcaggcagctgtgaaattacaggtgtgctgcgttcacatgccttaggagggatgagagctcacacttcttccagaaactcctccaggagcaagtagattgcagagaggaatgtgcttgaatgagggatataacacaagagttgtgagctgatactttgattgctgccttggcccctggaaagataagttcatgacattttccttcaagatgtgctctgaatgcaattcctgtagctcataaaatatcagtggaactcaggcagactgagccttaagggccatcaagaatgtgatgacaactggtacagtgttccacatgaccctgtttgtgctacatatatagattttgaaattcctttgaaaagcgcttccatctggtgaatctctctaaggagagaagttttagatttatgcattctagcatgtgaagaaaaaaattattcgtgctgttcctgagaagatcgaaaatttgcatcaacaaagcaggtcctttaatctgctttagttttcattttgacaagcattactcccagaccaagactgtcaaatgggttgttgctgttactgaacatttcctttggctttgttgaatcgttcctctcccatgtgtcaataataatgataatactgaaatggacacttaccatgtgcttatcattttccatgaataattaaacccctcaatcccatgatataggaacagtcactgtcccctgatttacacatgagaaaatacaggcttaaaaagagaagtcggctgcccaaagtcacaaatgaggcagcaagggaggcagactcgaaacttggactcattcttgggcacccagtgtcttctatgagctgcctcctgcctatgactatcataagcccaaggaaaagcagcagcaggatggcttgtccatgtgcttcttgcacatgtctgcacagcaacccaggtgtccagtgctcagcaggttgcagatctccctagacatgtctgagggcaaagtgtcagcgaatcttcttcattccctctcttcacaaggcctggaggcacccttcattgagtttgcatgagaagcatccaaacctcaaggtgctccagggcttgtcctagcagctgccacagcaaactgtcaaaaggagcaagtaggtgcttgagcaagtgccaggtctggccagtgcttgcactgcttgaaagctctcagtaaacaattaacttcaagtgtgttttctctgccagaatccattagggcaatcaatattggcatctctctttgcatgattaataagagtcccgttcctggacctgccctgcagaaagtaccttcaaaaattcctgaaggctttatagacattaataaattaagtctcccaacagctctccctgcaagaaaacacagagaacagagctgtttaagttggtggggagagacagagtgagagagagggcaggtatgcaggagaggaccccaccctctcaacccctcaccaccctgacacctcaccaaggccccttaggcacctttgtaaaacctccagaatacagtttcaaaaccaccagtcagtcctgacctacctcctccgtttatcttatttgtcactctgtctcatggttacctcgtacagggcctgacacttggaagtgctcaataaattgttgatcaggttgatatgccttggcaaaaaagaatcactgttgttttgtgtgtcctactttgctataaaaaaaagttacgtgaatataagaattcagaggagtatgttaaaccctacagaggaaattccgcaagaaaacatgttcaggcaaatgacttctaaagaccctccttttgcccccctcctcatccccttgccttcctgcttcctgccctgtagcagggccatgcaacgataattaaacagctttgacttgatgctactttctaggataaggtgcctatctccatcccttagttgtccccaaatgttcatcctgcttcctcttgacagggactgcctggccaacctacgtattgtgagagacatgacccaagttcctggcagagggactggaggctggggctgctgggcaaggaccaggctcagcgtctcaccctcacccaaggttctcccccaaggcacaggtggtgccatgggccagaaggacccgtctcagttcctgatgctactcactggcagaacagctgggctactgtgcagagaggcatttggcaggtgtgggggacagagatgcttccgtctgacacccagccatgccagggaaatactggagggagccattggggaaagagcattgctgccttccagtcctaaagcacgttcacctccactgttttctgtggaagaatgagttctgctggaattgttctggaagaattgttctggaagaatgagttctgtggaagaatgaattctggaacaattgttttaataagaatgattttgctgtcaaatggccagatttttttcattagtccagtgaggggtgtgccagctagttgccaagatgaatggattgagattgtttgaattactgagctctgaaataacaggatctcctcagtcccatctctggaaccaataccaaatgccatcagaggtcagcttctggtctgtttctcagctttagacaggtgtgcacttaaaccattcatgaaaaatgatagtagtttgtttccttaagtttatagtttaaaaaaaaagtgtatgaacttaggcccagtccttgttccagaggcagagatgtgggtgtctaaccgtggctccatgacctactagatgagcttccctggaaagtgggaataataattcctcccttgcagggctgtcaaagtttagttgggtaacttcaatattccccaaagtttctattatatagaaaaggattctgtggctaagtaggtttgggaaacaccacattgaaaataagcaggtttctttactgtagaatttctcagagcctttataatgcttatctataccaggaaatttcctggaaggggcttgagtaaatggcattttatttaactatgattcactttatttttttaaggaacatcttgctatatccagagcaaactttggggaaatgctagacaatacaataaatttaatctcatgccaacataggtaaggtaattgcaaccatttaataagtacccactatgttttgggtagagcgcagtataaataataaatgaacaatgcagtgtgctagcacctgaacaggaaatgtatttacatagatctctcccagacactctttaaaggcaccagcctactgggttcacagagcagctctgtcctgatttaaagggaaaacaatctgcttctaggactagttatccctctacacccatatccacatataaaaaagcagcttgtccttcttgacttgacccaggagccaccccaagtccattctgtcaattccttcaacaggttatctggccctctctcatgtaaccttcatgaatctctgttatttgtctagaatcatttgagcctgagtttgaactcccaaacttcaacttcctacccacataagttatttgtgcttcagtttctccaactataaaacctgaaccctgccacttcataaaggcagaaatgagagggagagattaaatgagaaactttattaataatagcaaattcttctgtaccactttttatgcaccaggctctgttgtaagggctcccatatatatgaatttttgacatcgccatgacagccctgtgggtgaggttctgttattacctccaaggcacagagaggttgcataatttgtccaagtgatcatgtgcaagcagggtgtgaacatgggtaggctgggagtcctagatccacgctcttaaccccctcaccttcaggtctaaacagtggctgccacacaataagtgtctattgatggacattttcttctccccccacattcttttccctgctaaactctctcttatgatcttactaatcaatttattctcctctcccccaaataccttcttgcttgttagttttatttgtttcatcattcatatctttaacacataaagaccgcatagcactaagtcctggaagttcatgagattattgtggggctttgaagtggggatttaattggattgggtaggggagagggaagcactggcagtttcatacccctcagggaactgcaaaaagcaccagttctgcagtgaataacatagcaagtggcccctggatggatatatatatatatatatatcaccttcacctctcatttcacaccagagaggcatatcttactgcaagttcacatttatcgggtttttattatgccttgggagggcaaggtccactgaattcttggtctggtcttttctcagcctaggtaggagccacggacctgtttgtctgaatcatggtgaaggaactcacaacatgcccggattgattaggtgcatttttccaccctcagccatgggggtgaagggggttggagaaggattggccctgatcttctaaacagcacacatctttctagcttctggatgaaagagtgagtcagggcaccaggaataactaggaacagttgatcctactcagtgtgttaaggggaacctggggctttaggcagagaaggctgtgtagaaagagaatcgatctgatatctgaagcagtggttgttccacacagctgggtgtctttgagccccttaacttttttgcttttttcagtactcatcacatattaaagctgtcgaggaattgacctagtacaaagtggtggcaataataacaataacatttacagtgcccgacactatgccaagctgtcaacacatacaaatgtcatttcatcgctcatttgaactatggaaaagctgacacttagacgaaataatgtgctcaaagacacagagcagactgaggggatgtcagaattatgaacccaaggctttctgactccaaggcccgaagctagagaatgcccactcgtatcaggttaatgtccacccctcatcaatttaatgttactttttccagacttagctcacacttgtaatcctaacgctttgagatgccaaggctggaggattgcttgaaccccgtagtttgataccagcctaggcaacatagcgagacgtcatctctacataaaataaaaatttagctggatgtggtggtgcgttcttatagttctagctactcaagaggctgaggcaggaggattgcttaagcccaggaggttgaggatacaatgagctacgatggcgcctctgcacaccagcctggacaacagagtgagaccctgtctcttaaacgaaaaaaaagttctagggctacctgtaaggaaaacatctttaattccatcacaaaatcaggcagtgccacaaagggcccagcctagagtgcgatgactggtgttgccgttacacccagttctctgctatccacatctggcttggtttccataggcacttagcagaattccagggccactcagggttctcagggtcccaagaagcacagaaaatgtaggcagcttctcagtcttttggcagagacagacttgtagccccaggactccagcctcagggaagatgtgttaagtctttagcagtcctcagatcagcagggactggggaggcaacaccgagaggcaacagccatttatttttgtgggaaatagagtgtcagagccatagaatgttaggtccagaaggcaccttagaaattacctaggccaggatttttcaaactttaattttgtcaagtgtaattctaccgagaacttaaacacccactatggatagataagaggaaaacaggattccttgctccttccaccattcagcagcacctccatgcctgcagtagagtttgaggcatactgatctcagctgcatgtcttgtcagctcaggagcctgaaacctagagaggttaaacaagttcctccaaagctcacccagatcatgagcccagtgagaggtagtgaactgatgttccccagatgatttctagatctgaaaaggtggagttggctctgcctcatcccacccccaggttaaattgaacttccttaggcagtgtggaaagccccagacatcttctttgaatggttgatgccatttaggctgtctcaattcccttttataagttttaactaatctcttatgaggggttaggaactatgagggggtggtgggcaggtgggggatggatcctgaaatagcttgaatagcttaagagccctggactacagcaagaacaagggtgatttacaagggtgggggtggggaggggccagaagctggaccacctccactcctcccaccatttggcccagagtcatcgttaatgagagttagttgaataaggcatttattcaacctggaaaatgcccagtggcttcagcccttatagtatggaattcctatctcttggcggggcgtggtggctcacacctgtgatcccagcactttgggaggccgaggcgggtggatcacgaggtcaagagatcgagaccatcctggccaacatggtgaaaacctgtctctactaaaaatacaaaaattagctgggtgtcatggcgggcgtctgtagtcccagctactcgggaggctgaggcggaggttgcagtgagccaagatcatgccactgcactccagcctggcgacagagtgagattctgtctaaaaaaaaaaaaaaaaaaaaaatcctatctctttttctgcacttggcccctccccagaactttgtgattggtcccaagagggaaaataaaacatatttggtggagaatgggtatgcactaaagttgcactgctagtgggggcccatagacctcgtggtgggtgaggatttagacacaacttgcaagatacaggggttgatccagcttttcccagaaaggcgtgggtgggttctgctgaactggcacatcaggagtttcactggggttaatgttttaaccgttgtgtcaatatacttaatgacactttgtttgaatattctataactgaatggaagcacttttaacgaacaagttttgttttatttttaggtgagcgaatagcagtaagatttacctaggtacactttgtactatattgaaaagtttacattttgaaaaaccaaatatgatatatttagaccaaagaaatagttagactttatgccttgagagctttgcaactctttcagtgcttataatcttttcaagatctgagggtctgtttcactctcctggtgcttcctggactgtgtagtttttatttgggagattaaccactgggggcttttgttcagaacctgccttggactgaatggctttggaccaggtctcacttggtgccttctgctcctatggtaaggagaaaagatctgcagccctcacagcccggctcctccaacactttggggtgtgaccttgggcaggaaacttcatcttcctctgtcgtttcctcatctgtgaacaggggatgatggtagtacctgcctcctgtggttgtggtgaggactcagtgaggtaatgactggtcctggttcagagtaaaccctcagtaattatcgaatattgttgtcaccagcactgtcaccccacagctagctgtctcttatgccaaaaactcaagtcatagaatttcagagttgaaggaaaccccagtaattcctaaaggtgcgttagaatccccaagggtgctttaaaagtcacctattcctgagatgcacccaagagccagtaaatcacaagggggtctgggaatccactctgctgagaagcaatgcaggagatggtaacatgcaaccagagatgaaaaccatcttcccttgcctgaatccccgctccaacaacccttgcaagtggtctccgggcttcttcttgaacacctccagcctggggagctcactatcacctgagacaatgcatcccattttggacaccttaggcaatgtaaatttgtcttcatgctgacctaaaggaaggggttccttctgaccctgaggaggcagaacagagcagtggaaagagagcaagctttgagctttgagctcagaagacgtgggctagaattccactctagcacttgttagctttgtggccctggataagtggtttgcaattttcttttccctttcctcttccaaatgaccttctttcaaatatttgagccctatccttccagtcttctcctagcctccctgtgtgataagaccttcatttcctttatcactttggtcacatgcccagctctgcccatgcacatgcaatactcaaagatgcacaggattccccaggtgtggttctgggtcagggagtcatcagggctggcaagggctgggagaatggaccagaaagccatagagtgagatacagggggaagaagaacacagactggcacaccagatccccggccctcaccttcacggtcctttggccaagctgccccctggttccaatagttctgggactaaaccctggcttttgcccttgcgccaggagtagtggtgaatgtaatcattctggccacatcattgagggaactagatgggatcagggccagctttgcctcctgttcactttgtccagagctgacatcagagcctgctggagagtaggtgagcagcaatatgtgtccctttttacccatgtccagatgcagcatccatccttatgacctcattccctccccagctgagattcattctcagtcacacacagtcttttcagtctagaagcaaagactcttctactcattgtgtaggtcagaaagagaaatgcaaaggttttgagatctgatttctgacctgaagatccttattactagctatgtgtcttcagaaagtttaacctctcttagtttcagttccttcatctgtaaaaattgagacataagtagcccatacctcatagattgcaggaagaattaaatgatgtggtgtatacaaactcttagtctaagtgattgatgtgtgttggcttcttgggggaaggagaggtgacagtgaatgatttcttaccccactacctgtgagagcagagcaagacaggctgggcttgcccatcaccctgcccttcaaccccctgtgggggacctagggttcaaatgaacgtcactatccacacttctgtaaagttggccagtgttactctggggcaaacctaaatagaatgtcaaacggaatttgaattttacagaggaaatgtgaaagtcttagagaacatttcgctagtttttaaaactttttataggtcacagttcagttgccttgcagtttcatgaactttgccagtgttttcaatttagcataaaaagtgtggtcagatttgtataaacctcacctgggaacttgtttgaagcacaagttctcagacccctccccagactcactgaaactctgggggtgcagctcagcagtctgtgttcagtgagcactccaggtgcttctcagggctcccgtttgagaacactggtctaggtgttagaagggtggtcccctcccttctccccttcctcccacccctggcagttttgaggtccagatgaccaagcccggctctctagccgtgtattttcagcacttccgtagtgtgaagacagctcctgagagaatgactcatcgtctcatcctgggagattcatgtatttgtgtcacagcaggtgtaatctaaatccaagcctaggcctggaaaagagttaggaaacaaacatctgttttgggtgttcagactgacagatcagttgtctccctccacctcggaggcttccttcctgatctcctgaccacagtaatagttctctgatggctaatgaaaatagcaaattttatcaagttctaccttttggaaaataccattcattattttccctttaatcctcacaacagcccaacaaggtagatgctattaagatccttatgtccttcacagtgaaacagcctcagagaggctaagtcatttgcccaagatcgtgtagctaataaatgggagacgagagacttgagttcaagtcagacaccagattctgtaaatcttcagccagacttcccacttggttaagcaagctagatccttgagccaggaatattctaggcctgtggttcttaaaatttgtcatggatcaagatttctggaggacatcttaaagcacagattgctggacccttgtccccaagtgttagattcagtgctgctaggttgaggcctgggaatttgcatttctagcaagctcccagatattgctggtgctgctggtccggagaccacacttaaagaatcacttctgtaggccagtatttctcaaccagggctgtacattagaatcatctgaggaacttcagattcaattgttctagtgtgagacactgccattctatttttttatgttccctggataattctaatgcacagccagggttgagaaccactgctatactcaaaggaagactactaattcctttttatagctttggttcttgagtcctgtgtccatttttttctaacggcagcatgcatacttctgggaaactcagtgtgtgcaacgggtaccaacactgcaagacaaatagtgctcattcatttcatttcaatattttctatgaaacaaacatctattgtggagtataatgcaaagtgttcatgaactcttaatgtaaaatgtaatgtaaatgggatttagtccactcctaagaatttagccaaggaaaattgtcaggaccaactgtcaaagatatgtacaagaagaggcatctaagtattactttgtcttgataattgctgagtctgtgtgatggttatatggtgattcattgttcaaagaatatctaatacttatgtcaagtacaaaaaggaggatacaaactgaatatttagtatgactctaattgtacttttaacaaaactatatacatacacacacagaaaaaagactggaagataacacaacaaaatattaccagtgattatttcttgatgggattatgggtgataatgataacattttctaatttttaaacaatattacttttatgattagaccaaaagaatttgtgtaggcagtcacctattcttgtaaatacattctacaatgtctgcctgaaatacaaagcatgcatttgtagattagaagttttttcagagaattagaaagcatcttacaattgttaattaaggtcccaatgggtgctaatgcctttgggacctggaaatgtgagaatcatcataggaacctagggagattgtgctgggcaaaagggcttttgctctgcaaggtggttcttctaatggggttaggcagcaggggttgctagaggctcctcaggatgcatggggtgagtgtggggcttttgtcctctcctctagcgagtacacactcctccacagtgcttctgtgtgacatcaccaaagcatccactataattaatgtatcatagatcaaatgcaccctagtaaagggaatttagcaatgtccatgtagtgtgcaaatatgcaggaggtaagaaagttaagcatatgtaactcaaggaccacctatgaatgttaataaagaaagaacatatggagaaaactcttgtattgcaaaacatgaagcccatgtgccttcatcatccccagaagtctgtctgttcatgctccctgggattccgttcagaaaacaagtaaatggtgccttctgcacatttatgttaaacggagaaccaaaaagagtgactaccccactccagtgcttgctggggctgggagaacaaagaagctgcaagtatgaggtactcaaagacagtgttactagggtaatgattttccagtatggccaaaagacatcttctatgcaaccaagcctcacctggccttacaaaacaaaagtggtttggccagagcttgaataacagctgggatggatggcccaatgtaaaggagcaggtggcaggccagtggaccccactctggggtggccccatggtggacagagcccctgctccctaaaatggccaacacctgtcccaaggaaggccacctagccagaagtgcccaccatctgctgtaatcaaatttgcaatcacaggtaacttttcctctcaagggtccagctggcaatataaataaatggaatgaatggggctcctcagatgagtacagcatcttccatgtatggggagcagacattactgagctgctgccatgtgggaatctcagtccagttgtgccaggtcttctgagttattccaagagaagcaagaattcgtctttgtgttatagtttccagtttctaaatattggtagcattttaaaaatatgtagtccaaagaagacagtcctgtgggctgactttggcctgcaggcaccagtttctcatctctgcttgtgaatgtcaagttctagagagaccattgctttagtcacctctgtcctctccctcctcttcccactcctgcctcaccaagaccaaattccaaaagaccagttctcctcaaaagttgtgtttcataaggaccttaaaattggctactagtctaacagtaatttatttcagttgaggactttttaaactccatgactaaccattgagggtactttctggatgattaagttaataattttaaaggaattgccttggtttttgaggggtagagggtatattatttgggaagtggctgtttcaaagtgagtgggatctaggtttaaatccagcttcaccacctgtatcacttaagcaagtgatgcagcctctcttagtttctcattatttaaaaaaaaaaaaaaaatacttcagacagattaatggagtttattcaagcaaagaattattcatgaattgggcagccctgagaaccagaacaggttcaaagggactccagggctgctgtttggttggataacatttatcaacagaaaaagcaaagtacagaaaacggaagtgacgtatagaaacagctggatcggttacagctgggcatttgccttatttgaaccaggtttaaacagatgtctgtctgtggttcagctactgtgattggctaagactaggctacttgctgcaagagtaggatatagcctgtttactcatcaagttgggttcattaggtactgacaaacctttagaccagacttaaagtagaggaggcggcttttggccaaattcaatttaacagtattttttcatccacaaaatagggaaaacaactgcagagtttgttggttttttttgggataaggatatttacatggctggtgccattggatgcccaggaaataaaagtttctcttcggagccaatgtaattgagactttaaattgcaaatattatataatagtcacaaaaaacttttatgtattttattttggaacttaagaaatcctttttctatagaattttcattgtaggtaggtagtattgcagttgagatggaagaaagtgggaaaatagagagggtgaggggatgagccttgtgggtgtctgtacctgggggaggtccttaggtcaacttccagtgctggaaacttaggtataacatgaccttattcaatttaactctttcgcttattgctgaatccctagtatctagcacatctgcaaacaaataaatatttgctattgttagctattaaattagttaatgaacaaacaaagggtgtatagtgggagttgtatctggcaaggatgactcctgactccacagctctgttcagatcatatcacatgtcagagacagggccagcttcacagtcatgaaacctgcactcagaatggccccatgcttggtttaagactctgctgttgccatcttgaagtgcttaataatttctaaacaaggggctctgcaaattatgtagccagtcctgatcagagcataacagtaaagacagaaatgttagtgcgtaaatcaaaacgtacaaactcatggcctctggagccaatcaaatatttttgacccacagagtgttttttaaatataaataaactcttaatataaacattttctttagaatagttggtttattaaaaagttgtaaagatagtacagagttcccatatatccctcacccagtttccagtatcgctaacatctcacaaaacatttgtcacagctgaggaactaacacatgaacactactgttattaaactctacacagtattcagtttttccctaatgccctttttctgttcctggattccatccaggataccacattacatttagtcagcacatctccttaggctcttcagactttccttgttttgatgaacttgacagttttgaggactaccagtcagatgttttgtagaacattcttcagtgttggtttgtctgattttttttatggttagatagggcttatgggttatggggagggagaccacagaagtgaagcgacttatcgtatcaaagccatattctatgaacacgattgatcactgttgatgttaaccttgatcacttggtcaaggtcatgtttgccaggtttcttgactataaagccacctatactgtactctttggaagcaactcaccaagcatagcccacgctcaagagcttcattcatctccttgaacagggagtatttacatatttggaatctcactacacaggagatttttcttttccctatttactatccaaccatttatttatatcagtgtgaactcacagatatttattttctactttaggttataatgcaaaactactccatctatttttttgctcagattgttccagtttgggccattccggagctctttcaggttggctcctacgcccctgtcattgtgtttttattagcacttcctttctttctgacactaaggtgtcccaggccatcttttatatttcctgcctcagtcctagaatcagccattttctccaaggggccctgattcctttatttaaaaaatgatgttggaaaccaagatccatgtgtttcatgtgctcagtgctacgagagtgtttttctttccttcttttttaatttttaaatttgaatttttaaaattaagctgtcagcttatagagtcaacttccaggctgagtgagctatataagactaaataatgttaataaataaaacgtttgaaaattttttagtgtccttgaattaactaaaatttaaccacggggaggtttcatgtaagaatctagatttctggattatcttgaaaaaaaacagaaggtctggcagtcctagatctatattcctgctggccaacaatcagctaaggctgagaggcttttttcctttcctgcataatacactctccaggctggcacagtccacgccactcccgatcatattacacccagcctactttactcattcatgttcctttgtaatccctgaaggcatgtgaatatgtgatatcttgtttaagacatattcaagtaaataatttacttgaattagttcatgaatttagcttgactttgacccagagataagattttagagccacatttctggtttcttccctatcccttcaacttaccttcgcgggatcttacatgcaaatgcaatgactcaccatttcttgctcagtgctgccttaacccctctatgtcaggtggaaaaagtcctcagcatccactcaccgtctttccctcagattctgtttgtctggagaagatcccccaacagttttattcctatctcaggttcatttcagaagggtcactgttccctttggctctgcaaagccccgctcaagttgggttccaattgttctttctgggttcccccaactgtacaaagaggatcaatgacattgctatcttctcccttgcccccacctcctcccattatgtgtctcagcatgatttgccaaccaaatctggcttattgcaaactttaataactctggaaaactacctgtttgactttatttagatgaaaataaccacatcaatgcaaatgtacaatacaattcgaagagggagatacttcttcctcggtatcagtaaaaatctgatagatgcgtttctctccgagatctgcaaggtgtgaagagataactgtgtattaatgttcacggtagcgttactccttagacgtgacttggttaaacgtgggcctatagcaattccatggagatctttctaccaagcagtggttttcagattgtgactcaagggccagtgcttggagttgggaaaagtaaggggaacccaagcaggggaagctcttcaccactcccgcacaactcaggtttctatggttatttgtttattcactggcctagtccattcaagctgctacaacaaaaataccacaaacagagtggcttataaacaacaaatgtttatttctcacagttcaggaggctgggaagtccaagatcaaggcactgacagattcagtgtctggtgggttcagtgtctggtgaggccttgcttcctgtttcacagatggcagtttttgctataacttcacatggagaaagaaaaaggaccctctttttttcttttttttttttctgagatggagtttcactcttgttgcccagtctggagtgcaatggtacaatattggctcaccgcaacctctgccttccaagttcaagtgattctcctgcctcagcctccctagtagctgggattacaagcatgcaccaccatgcccggctaattttgtatttttagtacagacggggtttctccatgttggtcaggccggtcttgaattcccgacctcaggtgatctgcccaccttagcctcccaaagtgctgggattacaggcctgagcgaccgcgcccagccaggaccctcctttttaaaggcactaatcccattcatggggtgtctgccttcatgacctaatcacctcccaaaggccccacctcctagtaccatcagcctgggaattaggatttcaacacgtgcatttgaggggggcataagcattcaatccgttgcattcaataattacatatggagaaccaccgtgttctgctatgcattcgatgccagggctatgactatgaacaagaaagatccctgacattacacaattttcagtctcctgggagacaaaaaaaaaaaaaaaaaaaggacaattaaaagttgatgtggtagtattgtcatggaagaagcagcgggtgttatgatatgcctacctagactgagggtgaggtggccagggaggacgttctagaggaagtgacaaattagttaaggtttgaataacaaatgggagttagtcaggcgaaatggagaagctgaggaagaggtttccagctaccaaccctccagtatgtagcaacgcccagaagcaagtgagaaagaggatcgtagcttcagatggctggagtattacatgcaagttgggagaatccagaaatgatggtggaccactgcatgtgtgaaatcataaagggtcttgcctgcatgttaaatagctttgatttcaccttggaagcagtaggaggctgctttagagttttatgcagaaaaacaggcttcctggttagatttgcgtattgggaaggtccttcacctgccaagtggagattgaagaaatgcaggagtaaagaaaggaagcttagttacaagggacctgcataaactaggcaggaggtgagctaggaaggaggcagtggggctgaagagaaatttagagatcagcaactgttcaagacaagacttggtgttaattgtccccacataatggaagaaagattctactggggaataaagaatagttttatttgtgaggatactcacaatattacatccatgacaaagaacctggctttcaaattctggttggggctcatgaaaaaaaccagaaggtgtggtagtcctagacctatattcctgatcaaactcctggtacctcagcctgactttccagaaccaatgaagttcattaacatcctgttctcagctctggctcatttgtcccatttgattttcagcaaactggtcaggtttacacggtctagggtttgtttctaatggcttttattgtcaatccacagtgaatatctttcacgggttatcttgggtctttcttaatctactgctcctttcacatccatgctgtgaaagcaggggacaaaggcagccatctgggagctggggatgctgatgagcaactcagaagtggcgctcaggggtaggaggaggtgtgacgagcaggcacgctggactcatggttgctccttggggtggctgaaacagcacttcctatgcccagcacatggcatgtctgaaagaattaagactctcttgagaacatataatcacataccactgtttgtctttcttttggcccaaccaccatgataacagactggaggacagcacaaaggggctggggaggggcagagggagggagttggaaaacagagtagtagccagtttatttctaagcatttgcagctgtcagcttgtttggggactttgttttctctttttttaggcagaggaacaaagtcctgctacacaggattgttttccttggcatgacgaacagacactttcttgaggaacgtactgagataacacaaaacatctgctaagaggaatcaatcctcgcagctgaattttcatcagcatcagcaagaacacgaagcttctctctctctccctctctgtatgtgtgtgtgtgtgtgtgtgtgtgtgtgtgtgtatgtatgtgtgtgtatatatatgtatatgtatgtatatatatagacagagagcaggaggcaggagaatggatggatgaaggggcaagagaataagctaagaggaggaggatatatattattaagaaacatctgtgttgttcatgtgttttgttttgttttgttttgtttttgccttgtgatccgattgcatcttgttttgcaagtattttggaaatggtgtgttctcagccacgctgccagaggaggtatgttttctttttccacgtgtgtgggatgttgtttttattcatgaactattgagaatgagtggtttttatgacttgtagagggattttcacatccctcttattactggactctgaagacagaagggacagcacaaatgccctcagacatgaataacagtttcaaggagaaacatgggcacttctggttgttgttgacatgccatcaggggtcccaaaggattggccaggaaatcaggtttcatcatatgtcctttggaagctccttggacagttcacatgctcttccaatatatgacatgtcttccaagtatactttccaagaagagtttatcctttggagaagaggcagcttcacctgtcctgtttcatttgccctcctgccacccctgtcttggcattgattcagaagagccgtcttcctagcgttggtaacatcggctgccatttgccagatgccttctgtgtgcctgctggtgctgtgcttctcatttagtccttgtggtctcatgaagagctaggtattattatcaccattcctcagacaagaaaacagaggcttttggcagttagcaaagttgcttaagggcaagcagcacagaagtcccacagctggaatcataaatgggattgaggccagagccaggcgtttcaccagtgtcctaaacccccagtgacacatacatttgggaaagtaaaagccaaactacccttttccaccttgtcttctaacaagtttcgtttccccagctgtgtcaatcgtatttgcatgagatgaaaggagctgtagaaaccctacaaagcttcctggcagaatagaaggagcataggctctgagacagacttgaattcagatccctcttcatcacaaactagctctataaagcccaagtctgtcccttcacctctttgagctttgatttcagggtatgcaggcggcacaggagctcagctctcattccaacggtcagcaagtatttattccatacccaccctgctccaggtgccaggccactaaggagacgtcactaaggagacacttgtgaggaggctggacaccgtccctgctctcacagagtggccagtctggagcaggtaacagacctgaagcagagactcccacagatacatgtggaattaccatgtgtgatctatgcaggaaaatttcaggagcagaataacagatgccagggaagctgggtctgcggatgatgggagacactgagccaagctctaaagaaagaagaggcagtaaccaggtgctcaataaaggggcctatctgccagttgtttgcagaacttgaggtgtttgggggcagttctccagtatccccagagacaaccttttggttcttactcttcagaccacaaaagcccaggttcagcccagcaccgatcacagatcagagtctcattcccaggtgttggcctttctcttccaaagaaaagggaaaatgatgaaaacaggaatgattaacagccagctcagaacacacatccccaccccccagtctcctggaccttcgtcaaccgaagcatttctgcatattctaaaggagtttttccttttttggcctccataacaagataaaataagtaacacaagccatttaggcaacttattttctttcagaggtgcctgaaaaggaaggattgaatgagatgtttgagggcttagtggaagggaggggcaggagggaaagaggaagaaagaaaaatgggttgaagtgcagaaattactggaatttttattaaattttcttggggagaaaggagatttcctaaggcagagatgaaaggcaaatctgcatggggcctcagagaaattattacgtttcatactcgatttagctctcacactgaatgtggcttggagatcagaaagttgtggttagacacattcataaactcagcagggctctgtcagatgcgggttcctgactgagtaccaaggcttcatgagcaacagagacagggctacaaggctgtctcatcaggccttcaagagagactccaggcctgcactctccttactctccaccctcaccccagcaccctggcctgcctcctccttagcctaattgctcagaaaactctagtcttgctttgagtctaactggtgagcagactcctgctagaaacttgtatcagtgattggtttggattctggcctctgcttaggcatgttgcctcggcgcactccaaaacttgagctcagctggccctgtttcaggctcattaactccatttcagtactggtccgtttgcagaaactaagctacatcacatgacccaaggccatccaggtccagggttatccttggacacctggatatccatcccctctctgtggagcactagtctgaacactttctcaatgtgggccaacttcttggagtctgaaattttccagcttttaagctaagagccactggtggtagctcagggtaggatagagagaagggcatgttctgagtctcaattattgattgcaaatcacttagagatcttgtaatcaaagattgttttctatatcatcaatacaggcacatatctaacagtctggtattattgctgatggtttgtctggattattataagactagtcaaaatctaactccaaacccttaagatatacaatctatttcagttaggactgctggttaatgttgtctggcattaactttctgagtacagtgactgaaaattaactctcactacctgaaaaaaaaaaaaaaaaaaagagaagaaggaagatttcaatgataaaaagaaagtttcagagtttttcctttccacaccctaggctggatcacagtgttcctcattgcaaagttttctcttctccccaaaagcaacatgcagccttccatgccaggactatatatatcaggagtctggcaaaaagctatcctttctgctgtgggttttctttttttttttttgcctcccccaaacaggagatgatggattcacatcttgactaaataagaccactgctcttttctgattcaattttgatcgatgaagtattccctgccttgcctgtgccaggtgctttcaaaggtggaatcaaagtataacacagtccctttgttcagagaacttacagcaatataagacataagtttgagaaactagtagaaaataatgcaaggtagattatactccagggcttatttagtacctgccactgtaagttttttgcaagtccagaattgatgtattaatgccaagactgctatcatgaaaataaatagccaggaatttaatcccaaagtttgtcacaaagaccatttggtcaatgggatactaaaactaacaattcacaatagaatactgcaaggcagtaagctaaaccttttagatgtttatgtaattaatctgcacaacaccctaagctacaaataacattaatatatccccatttttctttaagggatatattctttaaggggaaagtgaggcttggagacactacatcatctgcatatggctacattgtgaataagtggtaaaggtagaaataaagcctaggagttctggttacagactctgtgttttaaatcaatagctattataagcaaaggggaatccagatttaaataggattttttgctacagatattctcagatcctttactatgcttgggtacgttgtaaacctctatgaaaacagcatttttgccaatatatttggtctcagaatcctctctttttagccaaggatctctcaagaatagtgatttttaaaacacataatggggaatactgaagtggagggtctatcgtgtcttatgtactcatgaggcagaaggagggcattggttatggtcctgatgttgggtcacttgtgccatgtagaacacgggttgccctttgctcagacccagccatgcacagctccccaggtccaggatgccattgtagctagccaagtgtccgttcgaggtgatccagttgcctttcttcttccaattgctgagctggattcttttaaaacaaacattttttgagctccttccacaagcaagctaagtgcaggtcataaaatggtgtttttggctggacaagatagctcacacgtgtaatcccagcatgttgagaggctgaggtgggaggatcgcttgagcccaggagcttgagaccaggctgggcaacatagtgggaccttgtctccacaaaaacatttacaaaagttagccaggcatggtggcgcatgcctgtattctcagctacttggaaggctgaggcaggaggattgcttgggcccaggaggctgaggctgcagtgagctgtgattgtgacactgcactccagcctgggtgacagagtaaaaccctgtccttaaacaatgaataaattaaaataaaatggtattcttgtccctcaccttccctgacaccatagaacctataggatgctgaagaaagagcctgagttttgaagccaaatctctatctccttttacccttgtggcctggggcaaatgatttaactgagctaagcctcagtttccatttaaaaaaaaaaaaaactgagccgggcgtggtggatcacgcctataatcccagcactttgggaggctgaggtgggcagatcacgaggtcaggagatcgagaccatcctggctaacacagtgaaaccccgtctctactaaaaatacaaaaaattagccgggcgtggcggcgggcgcctgtagtcccagctacttgggaggctgaggcaggagaatggcatgaacctgggaggcggagcttgcagtgagccacgatcctgccactgtactgggcgaaagtgcgagactccatctcaaaaaaacacaaaaacaaacaaacaaaaaaacgaaaaacctgaaataataattccactactcagggtgtcactggaattaaatgacattgcacatacacagatcagccctcatttggaattcccttttcttttagttatgtaatggagattggatacttctttgcagcaccatgaagaaagaaaaccacctcaaatcaatcagttttcatgaactggctctctggagcctgccaggaaagggagtgggtcagcaagctgtatcttgttctatcttgctgccatgaggttagttacatagaatgagaaagttccagagtctgcagaaggggtggacatccgaggtctcgccatctgaagggataacctcttccaagtcccaccttctgaggtttatttaaaacacacacacaaatctggacgtctgtaaggcagaagggaaaagggtgaaaatagtatgcaaactgtagaattggcctctgaaccatcaataaatataagaatttttcaaatgcatgtagctttcctgttcttttcccactctctgtgagctggattttgtctttgactcagcagagaacccagtggggtttcctaggctcctgagggctcccaacctctttgcagtgtctggagttggcctggggtgactgcagtgcatgctgaacatgtctcaacttgaaccgtttgcagcttttgcttttgaagaatgaattacatgggagggagggaatggtggaagagtggggcctgacttagcagccagagccaagagattctgagcctggagtcctacctacccgaggagttcaggtgggaaataatgaaagttgaacttactcccaaagttccattgagtgccaagcacagtacagatactaataaaaacactacaaagtaaatttgtgtattagttttataataaagttgagtgatgaagactcgactggattttaaactaaagacctagtttaaaatcctagccctactgcttactagctacataggctacataagctgtagctagtaagaagtcaggttagtattttaaactaggtcttccagattgcaaaaccaactactctaaagccatagcccaaaatggataggcaagaggcaaacccccttcaaggccagagacaagtcagagaccaggtatggaatggaaggcacagctgagatttctgagctgagcagtggcagagatggggggaacagagccgcttggagacagtctaaaaggggccagcaattgccatgagcatccgcagtgtgtccaaaactttgccttatctgtagccagtgtggagggtaggggggctggctataagggccacacagataaactggcacagctgaaagtccctgtgtcccccagcatctggtgagcttccatgagactggaaccaggggaggagaagtgggagcacacttgagggagtttgagctgcccagaaaggaagggcttcagagctaaaagtgtgtgcagagcccgtgagcagtgctcgtggactttggagtcagactaactggctaaatctctcctctactatttccccgctgggtgaccttgggcagctacttaattgtcccaaatctatttctttatctgtgagatggaagtaatttaaggcctgttctgagggctcagttagctaatctatagatagggcttggcacagttcctagaacatagtaagagctcagtaaatactactttttactgttaatcccaggtctgtggtcttaaggcctgggcagagaaagctaacatactctcgttgaaggcagcagagtatgttagctgacctcttcttgcctctggttgtggcttctgatgctgtggacatttttctgtccttctccttcttctgtccccatcccctttcttttgcttatttatgtctctgtgccactgaagagtaacttttagatgcctcactgtgcttgacaatcgagtggttcctctaacctgggaagagagagcgttgtactctgtaatactcattttttggattttagagtcaggcggacttggttcaaatcccagccctaccactttttagcaacagaattcatgctgaagagcttcagtgctatttatctatgaaacattaataggaataataaaacctattccacagatacattgtgaagacaacatatgtcgacctcctggcattgtcaccaggtgggttacaggactccccatgtgaaggaaacatacctatcttagagggaatttcatcacttctgggactcaggcttcaaagactccagacccgcccccagtgtggcaacagcagttctgcaggcccctctccactgagaaagcagcccataaactctgcatgtggctgccctccaccttctccttggctctaccgcaccctcaaccccaaatcccagcatctgttgcccaggcagtcagctcccaagcagtgccagaacttctccctgggttcatttgatatgttgccactttgtttcaaagaaaagccattatcagtgttgggacccaagggaagcagatcttgtcactgccgcctgccagacatgttccttctcatcctgccctggggtcccaggtgatcccattacagtgtctcaccagacagctgctgctaggtttctgtggagggaaggacagcaaaactccaggcttcctggggacttggggcatgtgccgtgcatagttctacaattttgctgaaaggctagtggtcatttctacctttctttgacaagggtaattcttttgttgttgttggttttgtttgtttgtttgtttgagacggagtctcactctgtcgccaaggctggagtgcagtggcgcaatcttggctcactgcaacctccacctcccaggttcaagcaattcccctggctcagcctcctgagtagctgggattacaggcgcacgccacatgcccggctaatttttttgtatttttagtagagatagtgtttcaccatgttggccagactggtctcaaactcctgacctcaggcaatctgcctgcctcagcctcccaaagtgctggaattacaggtgtgagccaccgcatctggccgggtaattcttttccttataacaacagaccttaccttgtagagaaaagggaggacattatcaatttaataagctttcactatgttctaggcgctgtaggaggatcttacattaataccttcccagccatttaaggaagaccttattatgaccgctcttttacagatgagaaaccaaaagtcaaacaacttgcccacagtcatacagctggaaggggagcagagtaagaattcaaacaatgtctgtttagcttaggaacccattacaacatgtcaccacttaaggacagtgcaaataacaaaacagcttaagcagtgtttgagatggagaaaggacgtgggcttgcgatcctgcaatttgttgctttactgagctgggagtagtggtcatcagacgggaaatctgagtgacttcgatgaccactcaccctttctgtgttatgaaaaacaagacctcctcccaactcttaccttcctcaaagagacgaagggggaatctgtgatgcaaagtatctgtgaaagttattgaatttgcccacctcagaaacagtatacctcaggaaaagctttgcagactggtagcttgcaggcccagtgtaacttatagagatgttttattttgactcatggtactttttaaaacttcaagttaattgctaatgtttaaaaaatgcagcaggtccaagtataactctaaatttctgaattatcttgaaaaattagaagctctaacaacactgggcctccatccctatatggccactgttggctgtagtcgcagcaactgctccctttgatggggaggtggaaggtgctttctagtttgctaccaaccccccccccccacacacacacactccctatgactcctgtgacgggtgccagtctccctgtagcattgccctcagacagttttcatattagaggaaagaggaaaaggatctatcccatcatggtttcattctttcttctttttttcttctctaggtgttcccttcccaaagaacttccttcagatctgcaagaagatcctgtgccgccttttccgggtctttgtccacgtctatatccaccacttcgaccgggtcattgtgatgggtgcagaggcccatgtcaacacctgctacaaacacttctattactttgtcacagagatgaacctcatagaccgcaaggagctagagcctttggtaagtgacaccatgaaataatggtatccaagtcaccccaggagctcggccatttgtcagagcgcattgtcaatccctggaaaatgctcattgatggctagctgttagcctgagggctgcagaattgaatggggtttagtggtcaactaacagccaggagatgccaagatgtccactgtcaccaaataagtgtccgagattaccctccaagaggtggcagaatgttgtgggaatataatagtttggatcagagggagtagctttaactttcaattccaaagtcattcttccacttattgaattccttaaatgggcatctttgatattttatattatctctcactctgttaatcaaagattatcagaaacatttcttcagtcagtaaataaatatttagcacctactgtgtgccagctgctagggatacagtcaggtaaaactgcctttgggcagcttttactccagaggtagtgacagaagttaagccctaaataaggatacagtctcatagggactttgcttttcacattgagttttccatgatgcagcttcaatgggatatattagaatagagaacatttgatatgattaaatccttagtgttattgtttaggtgaatggggactacttttattttcttcaaaagctctctttccagtggcactcaatctgtgcttcagaagtcaaggacccctaaaaacctcatcaccttttgtaacatgcaacatctcaatgtggacactttgatcaaagctttttatagtggctctgttgagtactatattataccccatataatacaaggtgactgttttgctaaatataactgacagagcaactacatttcatccaagttcatttgaatgaccagagtactagggccaggctgtcctcttttgccaccctttatccctttctctttatgtacctattttaaaacacaggttttattatttttattttttctttgagacagggtctcactctgtctcccagtctggagtgcaatggcaagatcatagctaaccatagctcaccttcaactcctaggttcaagcactcctcccacctcagcctcccaagtagctgggactatagcctggcatggctatttttttttttttttttttttttttttttttttgtagcgatgggatctcattatgttgactaggcttgtctcaaactgctggcttcaagcaattctccacccttgttctcccaaagtgctgggattacaggtgtgagccaccatgcctggccaggttttattattatttaggtatggtaaagctaacagatcagatgattgtcattgaaaagagaatttgttatactcatcccaagagaaagagccatgccacgccacaagagagcacatgggaaagccccaggttagtccggagactgagggagcagagaaagcttgagcaagaaccttcaccatggttttcatgggaaggaaagggccagacagggtaagcaggtttagggttggctaatttgaataatctctggagcctaggggttattcctagttatctgataccttggcctggggtggttagtgtgagaccctgatggaggaggtatttggggtgcaggctctgcaggattggtttgtattggttgttgtgtaaacagcttgagcgcaaattgtttaccatcactaggaattggctagctctgggaggggcagtccctccaggatcaacaaggcccctttgatgttagagaatcgaaacacaaaaaataaaagatatgtttaatacagtacagtacctgtacctggcaaagaagatggtgaatttcacatatcacctttagtgtttttcaccttgaaatttattattctgctgtgagaatatatggcaaaaaaaaaaacacatatatatatatatatatatatatttgcattactcagtagtcctggaacaaagcaagactttttgggttacacttgagatggctcacatctttactttaaaaagagcctattttcttcattttctttcacaagagatttctagaaggctctcaggggcaggaaccgagttgtctctgaatgcagttggacaaatagtatggaaagaattcatcgatggctgagttttataaaggctgttttgggtaaacagccactatgggaagataaggttgtgcaaacagctcaagggagttaagactagaaacaattgataaagttaatttcagaaaatgtcaaggacagagaggaaagatggacaagggccacgtaaatgaagacccagaagaaaccactgcaatctcctggatggtttcagttcagttctcttctatagtcatgttcaggtcaatggaaaataacttctccaaaggcccacaagaaggaagaggctgtggaagcactcacacttttggtttcacagagctaagggatcagaaacaccacgacagagctgaaagtcaatttctcctttatgcctgaaagcataaagacaacattgtaggaaaaagctgagtgtaagttatcaagtagagaaaggctttctttgctatcagaaaactcagttattttctataattgaagaaagggctccaaggcagtgccaggaactaacttgaagtctcagagtcacagaatggcctcaaacatgtcaatatcctagacaagggcctctttgggggcctgggagaaaattaggttaaccagacatttttaacagtttaattgagcaagaaaggtaccaggtttttttccccagaagtttatatttctttaaatcttgcttgcaatagtatacttcctacatttatgtgttaattataattatagggaaattcattttaatgcttgtaaatattcatactttttaaatgcttaattgtctgaacatatatatttgttttacactaaccaaaccctataaaggaacagaaatagatattaagaatgtttctgaggcgaatcatataatatcaggctctggatacttagcacatgcagtgtccattaagagtagattgtttatggcttgtggattgctattgccgaaatgaccatttcaacagttgacagtgctaggatgcctaactgctaatactgttgcaatgcacctattcaaatcaggcataacatgtcaagtcaacacatttttatttgatttgcatatattgatactctatatatacaactcaagttgctcagatattctatgtgcataaaaaatctatgctctcgaggcaggcagatcacgaggtcaggagatcgagaccatcctggctaacacggtgaaaccccgtctctacgaaaaatacaaaaaaaaattagccaggcacggtggcgggtgcctgtagtcccagccactcgggaggctgaggcaggagaatggcgtgaacccgggaggcagagcttgcagtgagccgagatcacgccactgcagtccggcctgggcaaaagagcgagactccgtctcaaaaaaaaaaaaaaagaagaaaaagaaaaaaactatgctctcaagaaatttacaatacagtctgaaaaatataaaataataaatgtcacccatttttgaccctcaaaggatgatgaaggagtcaggcatttggcttcacattctagttgtacattttttagaattgaatgcagctggggccagaagggcagcatttgtccagccagtttcccttagaacattggcattcccagagttcccacgccaccggtgggacattcttggtgtcatgccttgggattccacagtatggaactctgagacccccccaccacctcatctttccctctgccttgcctccaccatgcacagccacacatctctttgttgcttttgtctcacgtggactgagtatctaccacacaggttgtgctgaggatccatgcagcaccctactggggtaggagagtcagtatcatacagtgcctaagaaaagtcttagactctgtgggttccaaccctggaccctgcatttactaacgtgcaaacttgagcaagatatatggcttttcaaagcttcattttcctcatccatagcatgggtataataataagagttataaaaattaaatgggttagtcacgtggaagtgcttaagaaatgttagctaagtgagacaatgactgtaacagtagctgggctgtagttagtggatgttcctgaattctgtcttccctagctcccatgacctcttttctgtcttaacgattgattccctaggtagactcctagcaaatgtagttaattgtatttgtatcagtcactcccatgggattgtcaactctttgagggctgggaatataaaggacatattcctgcattgcttagggttcctggtacctaataaatgcttaatatgtttttgaattggggagagtactttaaggatgatgcacctccattcaaagggattacacactggtcactctcttcaatacgccccttatctcagaacatgcatgcagacctccacttacccatttccatgttgggactaatgcttcatcctgtcagattagcaatagacattaaaagcaaaataagacagagagcagggatgcatcataagctttaggtctcacagagaaagacgaggcctcaactcttagtcattctctgttccaaattccagatagatcacccaggaaatcttgaatcctctcacactgcttttgtgccctggtgtgtcaggcaaaggataaccaaccctctctgttttagcagtgaaattctcatgtcctaggaaaactcttggtgtctgtcaaactaggacggttggtcaccctatcaggcctctgagtgggaatacagtttggaattcagaagctgggaagaggtcaccctggctagcctggtgaagaccagcacatccatccacccccagagcttgcctcatggctcccattgggacctgctgttcagccgctatggctggcagcctgggaacccaggcaaacacatgccatttcacttggtctccagcagggagggggagcctggcacactgacacagacacagacgtgacagatcatccattgctcatgtaaatgcaacagctgaagataacttgaactgaagcaagttccttgttggaggaaacagcccaaatgatgctgataattagaaaatgggccaggccctgattgaataagcaggctgctgttggcccttggctgccagggagtcagctgacacaattaagctaatcagaattatcattagcaagcacgaatagcccgcagtgttttgttggcctttcactgaaaacaaaagcagactcagagagggctgttagcaatgcagtagttgtgaatgaagagctgattagggcagggggaggacagagattcgtgaggtggggaggacagacaggaggggacttgtttaccctaatgcacctgctaacccctgggtgaccttggtccaggaccttctcattctctctccaaggctccattttcttgtttctaacaatgaaagtgattataccaccacctaccttgtagagctgctgctgtgaaaaccaatgttaccacagagctgttctgttaccttatagcagggtgcttggaccataggggtttctcaggagtccacacacacacacgtgcatcagaatctcctggaggaagtacttcataagtacattcttgggcctcaccccagatacactaaatcagaattattaagattagtgcctagtaccaagcaccctcagtctgcatctcaaactttaatgtgcatgtgaatcaccagggatcttgctgaaatgcaagttctgattcagtacatctgagaggaggagactcgagaatgttcattttgctcccagatgatatcgatgctgctggttcccagaccacacgttgagggaaaagaccctagatgacaattaccctcaaatgtgagaattaccatttttagcacttcatctcttctcctctaggattgggagttagctcagtggggtggggaagtaaagcaaaaaggagaaaaatctgaagatcagtgtttgccaagagagctcctcaaaatgccagtcctgagtgatggtcagtgaaaacagacttccttctgtggtcaaatgagtttacaaaatactacatcgtctccacccttgaagatttacagtgtacaatagcatatcaaagcctttgagaaggtatccagtaaagaaacttgttcaattttgtgtagcccgcccaatttaactgcatttggctactggacttttttcttttgctatcactcattgacatcttagagatatcatgatccatggaacacactctgggcagcactgctcatctttgtgatgtgatgtgtctctagatttttctattttcctcatgcctccaccctggcctcaaaccacacagccaccactgccgcatggagagggaggtgggaaggaagtgaaactccatatgggagggcttcacacacacacaggaagtgcagtccttttcattgttgctcctcatcctcccacatcatcatatgacagacaccccttcgtggaattcttaccatgtgcatgacgcacaagcattttcaagaaataattaataacttcatttcttcagttccagataatctgttagttcctcttgacatatattatttcatctcctcacacttgttacttttttttttttttttttttgagacagggtctcactctgtcacccaggctggtgtgatcatggctcactgcatcctctagcctcctgggctcaagtgatcctcccacctcagcctcctaagtagctggggctacaaacacatgtcaccacacctggctaatttttaaattttttgtagagacagggtctcactacgtttcccaggctggtctggaactcctgagctcaagtgatccttctgccttgacctcccaaagtgctgggattacagatggtacctggccagacttgttactattatttccagcagatgtgatgggcagtttctcaacatctgaaccacattcctctccatcccttatcactgccattttgtcacaccaaagtgcatgtcccacccccagtgtgtaggtgcctcttggctaatgattgagatttatggtaggctctaccaccaaaactatcctctaaaaacgggtgctttttagaacaatttgaagaccaaagatttggaaagccttgtctcataaaggcccagccacaagcctatccaggccccagaatacactgacctcatgttgccctaagaggtagccaggccacacatacacttctctcagagttgcttgggtgagtgcagcagccaaggttggcctgcaatggtaagatcaagtcaggactgtgaaaagaagcagaacctctcgcatgagccagagctactccctaaagtagccagcaatgaagagccattgtggggcttttgaaaggaccttttcttttgaaacatcatctgtacagaggcctctgggttgcttcttgtcaggcggcttccttggccttcagccagaaggcttgatgtggactcagccattatagaagaaagagctgcagcctgtgaagctgacagtttggcctttacaatggcatttccactattatgctaccacattagttaccacatggggcaaggcatgtaatggctctgagcctcagtttccccacctgtaaaagacatcatccctagaatcctcccagcctgacctacagagattactgatgggtcactactaagattactgacctactgggattactactgatatgatgtgtcagcagccctgtcatctttcatccaagacaaccgtttctctttgcttagagagcccttcatggattaaagcccactgtgggccaggcgtggtggctcacgcctgtaatcccaacactttgggaggcctaggcgggtggatcacctgaggtcaggagttccagaccagcctggccaaaatggtgaaaccccatctctactaaaaatacaaaaattagccaggcgtggtgtcaggtgcccataatcccagctactcaggaggctgaggcaggagaattgcttgaacccaggaggcggaggttgcagtgagccgagatcgtgccatcacactccagcctggggcacaacagcgagacttcgtcttaaaaaaaaaaaaaaaaaaagcccaccatggcagcagaggggcagagggggtgtacatgttgccaagagtagctggagtgtgcattcatggggctttgccagttcagatgacaagtatatgtgtgtccagggtggcatcggctgttggtggttgttcaggataatgcaaaggctcagagattagtgggagggcctgccagatatcattttaggagacttggcagatgtattctaaagtgtcaattggaaaaatagcaaagaaacatgattatttccaatgaattgccttatgctgggtaactggggatgtggcaaaaatagccacatgtctctgccagtcctatttattcatcccttgttgatgtccagagaacttttgcttctagtttatagggtgttgggtggttcatttttgttttagggtttctctttgtttctaatttggtcagagatgagatgtggtctgatttgtttcagggcctaaaatatgatcaattatagttgaagatgtctctcatgggaaaattgctagcatataatattaagtaataaaagcaggatacaaaactgtactggaaaatcactaatcatatgtccacagatgataaaggaaatagagcaaaaagtgccaacagtggttctctcttggtattactatagataatgcttttttttttttttttttggtatatactttttggggctttctaagttttctgtcacaaacatgtgtcacttttctaatcagaaaaatcaaactttatacttgaaaaggcttttccaaccacttgtgactactgagattaacattaaattaaaaattagtttcttagccttactagccacatgttaagtgctcaaaagccacatgtctagtggctattgtattggatatcacagatactgaacattttcatcattgtgggacattctctcagacaccactgagccagaggctctaccttcaagagctactttttataacccactcttaacaaccactccctccacaaagagctgccagatgtgttcacattgtctccatgctgccacatgaggcatttccgttcattgtttaagccccctagtatggttgcttctctttgctaagccacttctctcctactttattgataggaataaataaaactcagtaccttctgctcaacatttctccctagatttcccatcagaacctccacctcaggaagctgctcagtatcttaggggagctgttggtcagagacaccaaatagtaattgtacttttttatttttttaatgttctctgcagtgttggaaattgctgcaggatgtcagtcacagcagggattaattcgtcttcatgagcatttacatgaaaatgtaaatagtcagtatggcttgatgcccatatataagcctgccaaattttggctgctatgtgtggtctagactagtttaaatttcccggccagataagattagattctttggctccaaaaatgtcaagcgagtattaacttggggtttgaatgaaggaaggttttatttattgaaacataacattatattttctcccaccacccacctgtcccaccacaataaaggcatgaagataaggcaggttacaggcagtacctagcctagggacttgtgtggtcacttgtgtggtctcaggagcacttcctcctatgaaacaattttatacataaaggtcagatatacaaaccaccagcaaagccagttaagctataatgtggtactggaacataatactaattagtattaattccaagatgttggtgctaatagagtcctattacattgtgcatctaagtgtaaatggaccaatagacaagaataatgcctggaggcagatctggaagaagaaagagatatgcagatagctccatagggaacttcccagagttctttgaatgggccatgtcctctcacccccaggccattgtatgtacaactcctttggcttccatgtcctcagcttaagtcctgctcatcctgcaagtctaggcctaattgtccgcttctcagagacaaacacctttcatttgaaacgttaggtttctgctggctactcccagaatgccctgatatcagagagggcaaccaagatggaaatcaccatgtatcttctacagactagagtcagaagtgataacccaaccttcttcccactttccattcattagaagtaggttactaagtccagcccacactaaaggaaaattaaggtctatttctttctttctttttttttttttattttgagatggagtcttgctctgtcacccacactggagtgcagtggcatgatctcggctcactgcaacctccacctccctggttcaagcgattctcctgcctcagcctccagagcagctggaatgagaggtgcatgctactatgcccggataatttttttatttttagtagagatggggtttcaccatgttggccaggctggtctggaactcctgaactcaagtgatcctcctgcctcagcctcccaaagtgctgggattacaggtgtgagccaccaggcctggccatatttcttgaagagagaaatgttaaataattcttcatatgttaaataattttaaaatatttttaaaccaccacagagaccaacatttttaaactggtgatgtttttctttgacctctgcatttctctttcttttcccattttctacatcctacagcacaagtctgctacctctccaaagtgctcattgcttaagaaatctgactccgtgaaaactcctattacctcagtgtggtttcttcttcctccccttccttgaaagaagccagtctagccaactatctacactttctcacttccctttcaattcacagtaacttgccctccaccactccaccactccagaaacctggtctttctacagaagtacagtcatgtgtcacataatgatgggaatacattctgagaaatgtgtctttaggcaactttgccataatgtgaagatcatagagtatacttacataaaaatagatggtgtagctactacacacctaggctatgtggtatagcctattgctcctaggctataaacctgtacagcatgttactataatgaatactgtaggcaactgtaacataatggtaagtatttgtgtatctaaatgtagaaacagtacagtaaaaatacagtgtgaaagataaaaaatggtacacctgcctagggcatttgccatgaatggagcttgtaggactggcagttgctctgggtaagtcagtaagcttatacttgcttacctccaccctataccttctcccagaatccatcctacacgcaacaccttggctagacctaatggtgtttttgttaccccctgctggcagcgatcaccaccctaccctagaagtccatcccccaagactgcacttcagaagcctggcacctcacctgtgctatggcacccattatgcaaaccccagtatcaccagggcgctacgttccaggaacatggctgggtgctgaggatacagtgataggccaggcttggtcctcagtgtgagcctgcttctatgtgcaggcatatgaaaggtcttacttttcccactggtaaaaataaaaaggcatagccaagatcagcagttaccaaactgtggcccttagcacacaggttctataatttgctgggtgaagctggaacctagttcagggacttcacctaacctgagctgcaacatctctctcgtgaatggcatgtatgtaagaccacattaaaagaaatggtttctgctgctaaaataagttttaaatccattaggataggtttagattccctccagttctggcatgttgtggatccagaataacatagattgtcactgcctttccttttactttgtttatttctaatagtataattctgtttattttattttattttgagatagagtcttgctctgttacccaggctggagtgcagtggcatgatcttggctcactgcaacctccacctcctgggttcaagcaattctcccacctcagactcccgagtagctgggactacaggtgcgtgccaccacaactggctaattttttgtatttttagtagagacagggtttcaccatgttggccaggctggtcttgaacttctgacctcaagtgatccatccacctcgacctcccaaagtgctgggattataggcatgagccaccgcacccggcctctaatggtataattttaaaatagagattaatggtagagatttatgtccacgtcttattaaaatattttcatatagaagaactttaaatggcctgtaataactatatatattttttcatttgatttgttcagcttcagaggatataataatagggaagacttttaagtaaaactatgagccaagtgctgtaggaaatgtgtttatgtgttacgtcattcaatctgcacacaagtctatgagataaatactgtttatcttcattataaaaaggaagaaaatcagatgcagaggtgaaataacttgtccaatgtcacacagctctgtggagccaagattgagcacatacggtctgattccaaaacccagatacagcctttcctagaccattcgggctgctataacacaatgcctctggctgggtaatttataaacaacagaaatgcactgctcacagttctggaggctgggaagtcctacatcaaggtgctagtatccaataagggtttggtatccaataagggtttgctctctgcctgaaagatggtgccttctcactgcattctcacatggcagaagggcaaggaagccccccatcaggtctcttttataaggacactaatcccattcatgagggtggatcctcatcacttagtcacttcccaaaaggccccacctcttaatactattacactgggcattaggttccagcatgaattttggaagacaccaacattcaaattatagcatggtatttgctgaggaaactaatttgaggtggatttttgcccaaaggcttacttactcaactagattctgatgatctgcagcagctagataatttccaagggcctccagctccacgagcccagttctctccctgtctcagcagtgtgtgctgtgggaccacagtcaagtcactttagatacctgagcccatgaaatacacatagtgcacatagttgagcgactcaggtgaaacaggagtaaggagccaatcctaggtgctgctgtagctcaagagatatgactactgccctcaaggagtttgatgactatggatcagaagatccaaagccaaagtcaacagagtcaggcaggtaacaaatatcagttaacaggcgagtagcatgaaataggaagctgtgggggcaaccaccatgcaactcaactaatagtttcagggcgggcatagaggcccagtgcttccaaatcagaagaatttggaactctagcattttaggtgaattctccagagttttaaatgatggcaactacttagagcagtacttgtattttattttatttttaaatctacagatttaaaaatctgtagattttttaaaaaccccttctgggagtacagtttgcttagggatcatctgtttgcagtcatggttcatacagggcctatggtgggcaggagcagttctgacccattacaacctggcaacacatccacagtgcccacatttagagagcaatttttagttttcccttgtcctgaaagcccacaactttcaagcatatgaagcaaagtgtttgtgtgtgggcttgggggaggcatatgcaccatttcagtgaagacgacaagacagtggtcatttattgggttgatgtcagcttcaccccatgctgctgcatactggatcaccattgctggcctacagtgactgtattgctgtgggcaccaagagacagagcatggctgttcctttgtcattggcttcacttgacacgaccagtgtcatcgccagttggcatttaggttgttgaccctgtcgcggccaggccgagactgtaagcagctttgttattgtatgtgcctattccaaacagtagagccttcagaaaccgcactgtggggcacctatgctctgggaaactggtggaaaggaccagagtgctcacagcacatccagaagggatttcatcttattcacctttggagagcattggcaaatacacaagaatcaaagtagacattagaccacatccacatccagctttaattttacagcctaatgattgaagaagaagacttttcattaaggttggcactcttgcccatatctaaattccatttttaattcaaggtttctattgtggtttcctctttctctggaactcactctttccctgacggctacgacagcctttgtacgtatactgcagaggaatcttcataggtgctcagtgggtgtgttttttccctttggtgtcactggtgtaagatgtcggagttataataggttctcagacatagttactctattttgttttttgttgctagtgcaacggtacttggcattttgcattaaaagaaggagattattctaaatggaataattctcatttttctaatactgacagcaataacagagggaactgaattagttgggcatggatgttttcttggagacacattacacacacaagcacccacatgaacatgcactaatgctcatttgtccccataaagcctcaaatctttcaaaactcctatgaggatttttgtttcgtttcactaatggccttatgtgtaaaaatcttcttccttgaagcttttgaattttttttctaaaatggatagctatgttttttttttcctttctaaatttttttaattgtggtaaaatacacataaggaaatttagtgtcttaactatttttaagtgtacagttcagtggcattaaatgcactcacattgtcatgcaaccattaccatcatctatctagcttcaaactctgtatcttggtacctatggcttttgtttttgttgttgtttcttcacatatgaattgggtctttaggatttgcaagtgaggccaggatggggaacaaaaattacgtgaagtaaaaggatatcttgctttatttctcttgaactgaaccagtgctgctaccaattttcaatgcattccacaatttccctcttatattgagagcaaaccgcagtgtaacaacagtagcataaaatgccctgtactgctaaaaaaaaaaaaaaaaaaaggctaaaattccagcctcataataaaagacgaacaggtgaggaaggagccctaacagtaaaaatgcttttgccttattaagtacatttcctgtatgtaaaattcatattgttttcatggatcattcactgggagtctgagaataaggaaagaaaaggacttgtctcctctcatactctgaaagccaaagaggtttagttcttttttttttttttttttttttagtatttattgagcattcttgggtgtttctcggagagggggatttggcagggtcataggacaatagtggagggaaggtcagcagataaacatgtgaacaagggtctctggttttcctagacagaggaccccgcggccttccgcagtgtttgtgtccctgggtacttgagattagggagtggtgatgactcttaaggagcatgctgctttcaagcatctgtttaacaaagcacatcttgcaccacccttaatccatttaaccctgagtggacacagcacatgtttcagagagcacggggttgggggtaaagttatagattaacagcatcccaaggcagaagactttttcttagtacagaacaaaatggagtctcccatgtctacttctttctacaccgacacagtaacaatctgatctcttttccccacatttcccccttttctattctacaaaaccaccatcgtcatcatggcccgttctcaatgagctgttgggtatacctcccagacggggtggcggccgggcagaggggctcctcacttcccagacgatgggtggccaggcagagacgctcctcacttcccagacggggtggcggccgggcagaggctgcaatctcggcactttgggaggccaaggcaggcggctgggaggtggaggttgtagcgagcggagatcaggccactgcactccagcctgggcaacattgagcactgagtgagcgagactccatctgcaatcccggcacctcgggaggccgaggcaggcagatcactcgtggtcaggagctggagaccagcccggccaacaaggcgaaaccccgtctccaccaaaaaatgcaaaaaccagtcaggtgtggcggcgcgcgcctgcaatcccaggcactctgcaggctgaggcaggagaatcaggcagggaggttgcggtgagccaagatggcggcagtacagtccagccttggctttcacaactttggtggcatcagagggagaccggggagagggagagggagacgagggaaagggagacggagggggagggggagggagaggggtttagttctaagggactataggcatgtagagttcactccactcttgttttagaagcgtttttctactgatgtaacatcattgttctcccaagacagaagactggactatttatagattaaataaatattggactatttattgccaggtcagttttggaaaggcagcttggggatccatttataaccatgtgggtcaaaactagagagtctcactggtcatggtattggcatggtgcgacgcgaggtcagccagcttttctgaaaagacccccatgctaaatgccgggctctgtcccagtcgctcagctctgccatggaagtgcagaagcagccacaggcattcatccataaatgggtgtggcttactccaataaaacttgtttatggacatggaaatttgaatttcataaaataatcatatgtcataaaatattctttcttttttcaactatcaaaaaatgtaaaaaccactcttagcttatgggccatacaaaaacaggtgtggactggatttgacccatgaactgtcattttctggtccctgatatagaaaaaaagataggattccgaggcctgttgataagatccaaatgatatcctggtttgaattctcgctctgccaagtatcaaccatgtaaccttgggcaagtcactaacctttccaagtttcagttcctctctaggggaagcataatggccaccccatagacctgagagtcagtgacagagtcgggcacaaagtggtgaccagctcctgaggctctcacgagaccaaatttctctctgtgagagcttgagaacatgtttcaataggtggtagtcaaacttctagcaagagatctcattgtattaaaaggaaaattttagttttgtttcatgtctatttactccatcaaaataacactttgttcctaccaaaggagtgagactgcttagaaactacagacttcctaaattacaggctcactgaggaagcacattccccatatgttttcatcagacacacaatagaggtcttattaagcaatggcaagctctgtcctgtggtgaattcagctaggctgaacggcttctatggaatcctttgttttcccaggggaggtaaattcttcctttagggacccatgctctgaaagttcagaatactccctccaaaaggacaaaccgtttgttcagcgtttcttgcatgtcattaagagttgcccccattaagcttctgtcagaataaataaaactctggtgcctgcaacctaacctggagtttccggtactctctgcttcaccggccagtgccttccctcccactcctgatagaaaggccacatgacagaagcaaatgtgagaattccttcccctgccctcccgcatccagcctttaaggaactgcacaaccctacagggggcattgggccatgctgaaatctgtttcattcctcaaagcgggtgggtgcactcagtcaccctttgctcatcccagaacaaggggcagcagcagcatctgccagaaaccaatccagctgcgctgacaaatgctgggtatgagaaggagggaggcagactcctgccaactgtgcagacctccatgggggctctggagaagttgggtaacagaggaggaaaggagcggggagcagcagccaaatgtcagagatctcagtgtcgctttgagcagaaatcacaggctcctttgatcacaggtagcatcagtctgagcagaaatcaggttggatcccctgtcccatcagtgcatcagccaggttgatacaggtgggaaggacatggtaggtggatccacagagcaagacagggtgctaaaaaaaaagcacagagttgcagaatgaggggtgggctgcggggctctagggaggggatctgcagagatacagtgaccacaaacagttttgattaatgctcttgctttcacgatgcactatgaggcaacccaccatgtgtccgtaacccatctcctgtggttaaatgagagaacttcaaaaatgtgcagctctgtctttataagaaacaatgtaaatcaggaggctgaatatgtttacataaagtgacttatttttaatgtttgcagggtttggaaaaagaagagcagtttgatttttgtatcggtatgaataaatattctccgtgggtggcgagtgtgtgtgtttatctagccatacatatgtatatgtgcacttgggagcctgcacatatgtgcacacattcacacacacgcacccctccatcgtggaaacgccctccgtgtcagtaatgtgggctgttgtttaggaacagaattaatcaaataaatattgttctgtgtggtttagggaagtctggcctgccttgtttctatttttatttcgtttggcttatttgccacccacattcctaaaagagagcagaaagaacatttctaattcctgtgtgctggttggatcctgtatatacttagagttggggaaattttaaaaatatttttgtagactggctgccctgcctgctttataagaattcagactttgggatgctagcaaaggaagaacagcagccctggctgtgggcctcctgggaacggtcctgccagccgagtccctactcccgtggcccatgctggtgtggtacagccgctgattcagagactcaactgaaacagcacatgtagatatgaatgaagatatattcagcacgatggctcaggatatagtagactggttaggaggatgggttttcaagtttcaaccttggccagggtaattattagtgatgtggccatggccgaggtacttaacctccattacccctctgtaaaataagaatgataccacataccccataagactgatgtaaggattgaatgaaatgatgtccagcattgagcacagtgcctggcacacagaaaaggtgcaggaaatgatagaaactactccattcggaacacaagacactttggttaatgatggctctcttatcactgccccatcttgttcactctgactcttgtgacctggcacggcttcattcattcattcgttcacttctcaagttatttataccaataaagcctagttccaaaataaatttggggtggctgatgtcagcccctactggaattctctctcccagatgctctgaaacagacacaacaacgttacaaaaaaatagttcctaaaaaaatgtttaggcctcatgcctgaacctcgcctaaggattccaccattgactcctggtccctttaccctcctctgaaaacaagcttccaggcaggaagctccaccagcttgaccactgcagaaaaggccttgagggcaagaacgaagtcccctgagcctagggggagtgcatggcagggagactctccccgagggttcccagggatccctaacttgcagcactccctccacagcctcacacaaacagctgggaatggtccgggaaagcagattaagcagccctggactcaccctcactctgcaccaaggatgcaactgagggctccttagaaagtcatgccccaggaggccccacttgtggagttacctgcctgtccaccggagtcggggtgggaggggtccttcccctggagttgccaaggcatttgggaaaaggccagtgttatttcctctgatacatacagctatttggattctagaaagctaaaagagaaacaccacaggaagtggggagccagcctcgtttggacagctgtggtcccgacagcgacacagtggcctccctgtgcccgaggccaggcaagagctgccctgctgttgttcccaccttctacggttcccgctttgccacatggacttggctgtagagttgtttgggatgttttgtatttgcttgtttgtttttcttttctttttttctctcctctctttttccggggatttccctgcagcaagcagcctgatgtttttcatgggtcttccttgaagtcagacactcaccttcaaagcagaactgcacccccgtctgaaggagagccagctgccagggcaaattcttagcaaccagctctggggcgctgctgggatcctctatctctctttcatcacacccagagttctgctccctttctgggaattgctctgtctcccacctacgtggcttgtaagcttcacccacacccaagcagggctgggaaagaggaactggagtgctctggaggaaacaaggaaatagggctctccatgcagaaggaacaagtgtgcaaagatgcaagataaacagaagcaaggtgtatgcaaggccacagacaggggcgggaagcagatccagaagtccttgcaagtcatgggaagttgaggacttgatctagtaggaaatggagatgcaggaaaacagttttatttctccctggatcttcagcagtacctttccagccagtgctgttgaggacaccagcaggcattagagagtggtgcttctgggccttggtgcatactggaatcatgtggctgttacctctaggaccacaggcagcatggtgccacagggaattctgagcccttcaaactggacgattcagagagaacagttggttttcattttgatcattgaatgccttaccacaataccactgcctcttttgattccacagcccctgaaagcacacctgcccttgccttgggattcttttgacaacagtatcaccatgcctctcatagcgccacgacactagaagaaacctcactgattgctgtccctgtctacagtccaagaggatttcaaatgggcccacacggtatagctgagaacccgaatcccttgctgatgccagctcattttctttggtctcatcctcatcactcctccaagaaaactacccagtccagagggacttgcttttgctataagtgggttagatcttgagataaggaaatagcaaaatgttggtgtaacattgagtgtggaaatgtggcctgagggaagtgagtgctggcaggagctgaggaccctgttgggagggggccgtgaaaccttggcatagacctcgccagcacagctgtttggaatggaggcaggaagggcaggggaaagccatgagagagggaattttcaagatggtcagtgttctcaatccacagccatcacagaagaaactaatgaaatatgggtacaatctggagatttttaagtctctaagaagtggaatttgtgagacgaaaggcttccagaaagccctctttctgacctggcctctacccctagagggccttagccttgctgtggggaatgaaactcttcccggttgtagggttttggtgctgtccacccccagcccagccagaaatgtggcttctgtacttctgctgcagttcaagccacttttccaggtatgtcccatctgagtggagatggggctgacggcaggccacagggccaagctcgggcacggggccggtagctgggactgaggctgcactgctgattaatgggcagggaggcactttgtgaaacgtgcaataccctttgacggccttttccgggggactcgcagctttcctcgtgtcttttcagcaatatcacatttgattttacctttaaaatgtattgatgaagctgcatgattggaaaaggtgctgggggagatgaatctctcctactttccgttctgtttccattacttcaggggtgtgtacgcatgagtatacacgtgtgcgggcgtgctgtattagagagcccaatttcctttatatacgtgaactcctccccctagtagccaccattaaacatccaacggctttaaaatggttagtgagaagtacacaacataatgtcagatgtggccctgagagaggcgtactgctcactgccctgctttaacccgttggctgtttaatggtggttactaggggcaggagttcacgtatataacagtcatttttccaaagtttccagcaccaagggtcctcctgctccttaccacactgcggagccttctacatctcttcatactgcttttcttccttgattattttttgtttcaagtatttcttcctccccctttctcctggtgtctcagagttagcaggaagctggtaattaaaagaagacatgggttttgaaatgctgctgtggtagctcttccccccccttatccattttacaacagaaacaaaaagactcactccttttcttttgctcctccctccagcagagtaatgaaagcagaatgttgtttgcttgtttttgtttttgagtccactaaatcattattgttacactgactagctgggtgaacttgggcaagttagttcaaatttctgggcctccttttcctcatctgtaaattagaaaaagtaatgcctagttcatagagttgtgagaaagtgcacaaggtaagtctaagtgccttccccatcgtaggtatgaaatgcgtgtttccttccacctctcattttacttgggtctgtagacctaataagtgttccttttcattggatttcagtttaatttaatatgttttaagcacctagtatgtgccaggtcttgagcaccagggtctacacaaataccagataggttttctctcttcaagagcagcctggtgctgaaaccaggaatgtgataaacggtcgcacaacagtgtgaaaggtgtcatgggcactgagggaatctggaagaggagcacctaggattccttggggacagggtgggagggtagaagaatgtgtccctaaggagatgacaactggtcaagagcgttaaagggtgttggcgatgggagaagggtgttctgggaagagaggagcatgtgtatggaaatcgttgtgtgttccatgggagagaaggagcgtcggccaccgatgggggatgaggttgagtgcctgagaagagtctagatcaggaacagcatcgtatgttacagtggagacttggtttgaaaactactgaaagccattaatggagtttaggagcatcatgagatgataaagattttacctgcagcacatcaagccagctctaagaaatcctgtgtacacaaattgcctctttcgaatcaatgtgaagtcagagagcccacaggccagcagtccagttctgccactaattagttttgccgcattagggaagtcacttactttccgatggtctgagttgccacatctccgaaattaaagtgttggagtaggtgacacccatgtttcctcccagctataacagcagcctatgactctgtgatgatgtcactgctttttggcgcttgtttcataattcctagagttaacttattaaaattgctgtgcaagcatgatgactgtcccctagtaaacatcaagtgttcttcttcatatgttccatatgaaaattagcttcttgggccaggcgcagtggctcatgcctataatcccagcaatttgggaggccaaggcaggcggatcacgaggtcaggagatcgagaccatcctggctaactactaaaaatacaaaaaattagccgggcgtggtggcgggcatctgtagtcccagctactcaggaggctgaggctggagaatggcgtgaccccaggaggtggagcttgcagtgagccgagatcgcgccactgcgctccagcctgggggaacaaagcgagactccatctcaaaaagaaaaagaaaaaaaagaatattagattactaaaatgtgtgatgatgtagtgcagtaaactgagagcgttgatttctttgtagtcttgcctaagtcagagagtatttgtgtgacttggaataagtcattttacttctctggatcattattccctatcctccactgactaccagttataaaaatgggtacactgaggttagactaagatttgacacttagagttcacggaagtttgttcaatggctatcaagaacttcttccaactgctaacaagtacataaagaagatttaaatttaaaaagtgtttagatcagaacagaaaaaattgagtatcttatgtaaaagacaggctgatttcatccacccccaccgtccccacaaaaactaggcaaatgtcattttaacttcatttctaaagtgaaatatgatttcagattggagtctctgtctactttcctttttgttttttaaataaccggtcttgttttcttagaaaaaaattcatgcatatcaaaaatatctaaaacttcagactccgcaaaggacaaaaaaattagaaacagaaaacatacacaattgtattcacccaaagataaatttatcatgttggacccatatttttctttatattttttctcaaaataactggatcaaaccatacatcctgttatacaatttgaataaaatatgcatcatacattaatatactaaaaaatattaatgttcttctcagattcaggcaaaaatgaaatgatgaattccaatgtgatagaatgcaaatgtgtgcaaagtgatggagatacccaagaaaggagctgacaattgcatcttaaaggatgtcaaaatttgccaggcagagaagggcagaaaatatttaccagatataagaaagaaaccactagaaactggccagttggagacctggagaagtctagtttgcctggctggtgtggtgagtgggagggaattcagcaggaggtgagcagggggcgatgggtcctctttctttgacaggcttcagaggatggaatttgttttgttgacagtggagaaccagggacttcatagaatcaattactgctttattttaaaacaaatgaaaccgagtgaccacaaccaagattctactttgatcttctgttaaaaacacattttgaaaaattcaggtgtttttgaaaatcttcatatacaagccaagcacagtcaccaggaactttctcagaagcttctcatcacctcagcggaagccttttaatacacgttttggagttctttagtggcctgccttaatacacagggcattcagtaactccagcaatggcaaattcattgtaaagagcaccctgggtagaagctattttggccacactctcagagaggaaggaatgtgtttggccctgctagcctgcgggagggctctgatgaagaaagcgatggaacctagcattgccatttgtttatttaaacgagtttttttttttaacagctcattggctccacccagtgggcaagtgctagaatacagcttgcagagtcttgcagagctttgaaggatggatccaactcaaatgtctttcctgatgtttctgatctgctatttcaaccatacattccctttatgaatttaagaggcatcccaggaaacagtttttatcctgcatctcagtgaccttgaataagtaccctgtcctctctgaaactgttactctgctacttaaaaaaaaactctgccatatttctagtgtccatactctctcagtggcataattgttctagtatttgcccattgtacctataattcaaactggcatcagtctggataaagaaaaaaatctggcattttgaaaattcatgaatgactgcaaccacctataattatatatgtcaattaatatatgccagtattatccgattgcatattcataagactatcttagaggctttaacctacaatcacatggtgtagtagaaagagcaagcctttgcggtcagatagacctgagtttaaaccgtagacctgcagctttctatgtgacctggtaaggtactctccttccctgagggtttttcctcatcaatacagtagagatggcaaatcttacttcacaaagtataatatctgtatagcagtagacactgggactggcaaacagcaggcctctgtttaataaaagcagcggttactgttgagcattctgtaccttacccatttaccttgagcaaatagcttctgctctgaaactgggattcttcctctgtccattggaggtcatagttccctgtcttagagttatacagatgcaatggtataaccaccccaaagcacctggcatcttatagatatttaactatagctagcttctttcttttcaaaagtacagacctattgcaaataattaagttataaagctaaaattctgtttatcccatgaacacactttctctctccctacttctctttctgtctctctcaaacacacacacacatgctcttgttgtattcccatcttgttttccttgtctgtgtcatcaagagttaagccaaaagctgggtgcagtggttcacacctgtaatcccagcactttgggaggccaagatgggtaatgcttgagctcaggagtctgagaccaaccagggcaacatggtgaaatcctgtctatacaacaaacttaaaaactagccaggtgtggtgttgtgtgcctatagtcccagctactcaggagtctgaggtgggtggatagcttgagcccgagtggttgaggctgcagtgagctgttgccactgcactccagcctgggcaacagcaagatcctgtcgaaaaaattaaaaattgaaaaaattagatatacacatagatttgtaacttcctgtattaataattatagagatgcaaaagtgcctagattctgccttgtctattgttatttctttaaccagcacatctgtatggttttcgaatagaacgcttctctgaacaccttggcactcccacactcagtctcctttttctcgatgtttcctattatataaggtgtggcagtccaggtcagtatgcaagagatgtagtagctgcagtcagctctgcagcaggtagaacttggaagatcgttcatctaactaaagtgacatgaaacttgtcttctcaagatgctaaatggcacagggctcattactagcctgctcctcagaccatccttggagatgaaagaggagccactaccctggcacagtgccaggggcaggggctacaaagatgaaagcacatggggcgattcaatgagtgcttctttttcctggcacttagtagcgcccagtctagcagggccaacagacatgtccagagccccagtacacacacacacacacagagatgtacaaattcatacactgcatgtaagaatcaatgtgtgcacaggaggagagagtggctacctccacagcgagtggggcaggagtgcgggaaggtctcccagcaggtaaaagtcaccttacctgaggtggaaaaatgagtggcaatttgacaaatgaagaggggcaggcgcaggatgtggtagcagcggaccataggcatgggactcaacctgtgcggagccccaggggtagagaaaggatggctattcgggatctataaatacccacaagagccaggcaggtgacgcatgtcagacactttggtgtattattcatttctatttttaaaaatgtcctccttcctgcttttcttgacttatacccacttatcctttatttttccatctttgattgaaacttaaatctttccctactcgaagaaaactagcagtccaaatccaattactgtatcagttcataagtgctacatggctcctgctgggaagtcaggtgggagtggcaaggactggggcaaactggagagcaaattcttctgctgaagaggacagccattcttcaactccagttgttcagaagctccaaatcttgcaatttctcagaaaaagcaagcaagcaacctgaattttgatacatgagtcaaatttttaaacagtgccttaatggaaaaaaaaaattctgcagaacaaacagatggaacataccctcatgctaagccttattcatggaccatgcttgcaagctttcatttacaggctctcgagattccaagagcattttcaggatccttcaccaaatcgttgctctgcttatagtttctcctaaccatccttttccccttgctttccagaaagaaatgacgagcaggatgtgtcactaatgctccacctcaccctttggaagaaaggaaagctgtttcctcctggtgccctgagcgggcaggaggtggaccaccctggctgaaatgacacacctactcccaggaacagcagaggtggaggcaagcagtgactcctgagagacattccccactcactttgtgtgctcttaaccttctgagtgctgctagcccagacctgtggacgaggcagaccacaacgtgaaagaaggaccagccccttgaccgttctggctggggaattgtccacgaggaagcctctgcacttccacacatggcacagttctgcctgtgacctgccgcctaagctttactggaattcaggttttgagactgagatgcgtgttcgtatttttccacttatctgtcttgtcagctggccgacttctctgtgattggttttttaagtgccgggtgaattttggacctctggatgtgcagcaagtttttatgcaataagccttcctttcaggtctctaaaagctcctgctctgatctgtggtttaacactgtgcagggctgtggagctctgagacacctgaacccctacccatcccctgcacctccctactctccctgccgaggcgtccatagcatttccctaataaatagttttatcagggacactccatggggtggcttgtctctgccccaaacagggtcttcacgttctaactgcagggaagagactggttactagcgtaaagctgacaagttaccagttcacctgatcagaatgtattttttataaccaccatcattccttgtctcttcagtggaagatattctttcctgtttcccagaagagagaaataaaagtcctaaataactaagaatgatcagcgggagcgttgggcatgattactgcagtgtttgttctttattaaagacagggagtcgtggctgtctctacataatactaacatttcagtgaaaaaagtacaattggttatttggtacgtgtagatttaacacccagacggctgacttgtaaccctccccactagccttctgagcatttaaacccagccgtcattctctccccactccacgctccccactcctctgccacgttatgttacggcacaaaattaatttctgcccctgtgattgggccacggttgccaaggtaacagtggagctggagctaacttccttctttcatcctttccaatttttctattccagaagacagtcagaataatgcattctgtactacatcctgccttttgaaacctaaatgagttttcgttgatgaaatgttgccttctctgattcattcacaaaactgtggtggttctgaccacctgtgacgaggggggtcataatacttccagtgatccttttaatttagcaaaatatttgtcggtggagggaagtagataagaatgtattagtgtattttaaagtaataatgattaaagaataactaaatgactctgattttgttttatcaatcataatgtgttaaagccctctgtggctgccacaaaagactagaatcatgaaatctttgtccaagctaagaaagggctgtctctgtgggtacagtggcattctctgttgacctaaccaagcagcctgaaccttgctttgtgtctcgtaaaggtcatctcacggaatccaattgctgctacctcaccatgttgctgtgccctggtcaacaataaacatacttttgtcccccttcctaagtaactttgagaggacaagataggcaaagttttttccctacatctcttttggccaaaagaatatctgaccatcacagagatccagagaacagaaacaagagcccctaagtcccagcctctgcaatacacagttaccagatgggaatgcagcacagtggcacagagaggtaactacggagcccatgccctggaggaactctgtagctgtgcatcatggaacgccacaggatttttacattaaaaagttgaatatgttcctgcatttcagcagtgcataatcgagcaggaggctggaatctggagacctttgttattcattctttttaaggttattttttattaactgtgcatatgaaatttccactcaatttaaaaatccaaatctttttaagcttcttggaagaatttcctcctgcttatattgttaattgcactaatgaactcttctagggtaaattctggcaaactaccctttttttttttttaatcacagaatattcctgttcccacagaactttggcacattctgaagaaaatctctgcagtcaatttttatctcctctgcttgactgcatctaactgttcatctctgttataaatggagcttcagccctctgggtcagagactgacaaccctccttcttcttcctaacctgtcctactctccttctttttctgctttcattttaattttgggaaattttaaagtaaaagtttcaaagttgaaagattatagtgagtacccttatgtcctttagtgcatcagttgttaatgttttgccttgttttcttttcttccttttttttttttaagagaaggggtctctccctattttacccaagctggccttgaaccccttgcctcaagtgagcttcaaccttagcctcctgagtagccaggactatggcatgtaccaccgcacctgcctcacattttctttctcactgtaaatacacattcttattcttgaaccttctgaaaataagttgcagacatcatgaaaatgtaaaatacttcatcatattctttcttttaataagagcattgtcctataaatctgcaatattttcacgcccatgaaactgaacactgatactgcataaatctaatatatgatccatattcaaaattctccagttgtccccaaaatatcctttatagctgtttatttttaaatccaggatccaatcaagaattatacgttatatgtagttgtcattctcttttgtttcctttaattgattagagttgcccttttgtgtgtgtctgagtggtgggtggtggggtggtgtttgtgtatgatgtgcagtgtgtgtgtgtgtggtgtgtctttcatgacactgacattattaaagagttcaggcaagtttgtggaatgtcccacaatctagacttttttactgattgtttcctcattacgagatacaggttacattttttttcccaagactgctacatgtgtgatgttgtttccttactactgcctcacctcaggaagcacataatgtctacttgtctcttttctgatattaggactgatcaggtgttgtctgcctgatccaatcattatcaagttccataattcattattaagctctgaaattcaggacacatacatttatagagtgtgaggctgtgcatacgtacattcatcccttaatgttctcaaggaggcccaggatccccaaaatattataagcattgcagtcagatgatatagcactagcaaagcattcatccctttccatataacaggagggaggggaagaaggaagtttccatgtgcaggcaatacgtgagagcatgggcaagtgaggatttgtatgctccctgtagccagaggtgaaatattcaacgcttttattttttctcccgtcttcaatgacctcccatttggacccatagtttatttatagagagcacacactccctaattgtcagatggtttttttgggaaaactcttagatagtacagtgagttgtgaccctccaaaggatcacaagtacataaacagatacaaagtatttatgtggtattaaaatttcatggtgatggtgcaagggagagatgattaggaagaaaatgtcttacacggctgtaattgagaaatactgatctagagtcatttcctgcttcttaaattgttcgttttctcttccctgggtattttctcatttccaaagacccagagtctcagagccaggttaagtggaagaaactttgagaggtttcttaatcaattccttctatctctcaaaccatgccagtaacttccttggtgaaaaaatctatactcctctcacagttcttcgggcatggaaattctatagcattctttggtataaccaacccactgaaccctccacaacatcttgaattccattcaactcgagctgaagtattctttttgagtttcagtatatcttttctagtgtcccacttttagaaaggtccaaagatgatatataataagtgaaaatacaattaatcagagctttatttgcatatccattaaatatctgaaggctattaccagttgtgcttcagcctcctttcccttgcaattctcccagggtggcatcctctacggagtcttgttgctccattgttgaccactgatgtaactcaacgtgaaaccttcccaaagctctccacatcactctctgttatggctgtgaccagcagtgaacatgaaaagaacttatttcatgccttctccaaactatattgtttctttgctaagtccagacctgctttttctacatttataggttttctattttaatcgccatgcaaaattctttatcatactcaatcattttggtttatcttcctgacttcttacctttaacatccctgttaaagattacactgttgttgtttcaaaaaaaaaaaaaaaaaaaccttaattggcaaaacattaagggacttgaatagaattacacttatctttttgtgctgatttatgtcaatccatcattctggttattgatggaagcaaattgcttcctatgttctctaaaccttatgtcccttccatactccatgagtaccacactgggagaaaacaaaagcaaaaagattgtgggaaaagtatagccattatctttgaggaaatgtgtaccaaggcacaatcattaaaaggagttggaggcatcatttggttgacactgttgtcattcttgttctgatcattttggaccttgaagaaattggtgattctctcctagaattagacaaacaaagtgtgtttggaaataatgattgttttcctgccttaaaaaatatattaacagaaagcttttataacaggctgtttccctctggacaggtattaattctgagtaagaattttcagtgactacataaggatttgtgtaacttatgaaggaagagtccatttctaatcaaataattcgcctgttttactagcttatagtgatctgatttcagaattttcctgtatcttttttacatacatcagaaaaagaaatgtttactatatttttggttccatttatgattgtattaagcatttgactataaggaaaactaacaattaaatcaattagaaaagcaacataaaattaaatgatatttaggaaatcagttatatgtgagcttgggtattcaaatgtcacaaataaaaagcatataaccatta

SEQ ID NO: 465 - DNA, 190336 bp, Homo sapiens
  source 1..190336: mol_type = genomic DNA; note = NC_000011.10:47980504-48170839 PTPRJ [organism=Homo sapiens] [GeneID=5795] [chromosome=11]
ttcagagggggaggggaagggagggggccgagcgctcgccgcggctccctgcagcagccccagccgcatgacgcgcggaggaggcagcgggagcagccgcgggagccgggaccgggtagccgcgcgctgggggtgggcgccgctcgctccgccccgcgaagcccctgcgcgctcagggacgcggcccccccgcggcagccgcgctaggctccggcgtgtggccgcggccgccgccgccgctgccatgtctccggggaagcccggggcgggcggagcggggacgaggcggaccggctggcggaggaggaggcgaaggagacggcaggaggcggcgacgacggtgcccgggctcgggcgcacggcggggcccgattcgcgcgtccggggcacgttccagggcgcgcggggcatgaagccggcggcgcgggaggcgcggctgcctccgcgctcgcccgggctgcgctgggcgctgccgctgctgctgctgctgctgcgcctgggccaggtaagcgccgggtgggctcgggcggggggcaggaggctggggcgggactggcattgactgcacctgcccgagcgtacccccccggggggttccggggaagggggcgggggtccggatccccggatccccggaaggcgacttgcggggaccccggccggcctcgcacgccggcgatcgatcccttttccggctgcccaggatcgggggagagaggcgggatccgggtgccgcggtgcccgagcctcccggggaaagcctccgcgcgggctccaggccgtccctggcccggctcttcccggcgctgggcacatctggcgggcacgggcccggcttcctagccggaggcggccggagggggcgtgtttgcggaggtctggggacgcagagccgggcggcctggctgagcctttgccgacagacctccgacccggcctgcaggggcccgaggggcggcgggggcgacagggcagggccaggcgctgggcagtggggccctgggcgaggcgcgggactccgggccgagggccctgttcctggggaaagttcccaggccggggaaaaggtggccgcacgctggcttttctcaaggcagccggccctcttggcgtcgtgcttgatttcatgggtgtttaattcgtgctttgtgggcgctggctccccctccccaccccaccctcaccctcttttctggcttcacttttcagataatgctgtccctggcgttttggtgaccgacctttccccttcctggcatttccataggggctgaggcagagcagctgaaggggcattcccatttcacagatggggaactgagggagagaagtgaaatagcggagcacccagcccgtgccatgggagctgagccagcgggcacgtcctcttagcctctggagcctgttggggtttgaacccgcaggggaagcggtctagggctgccttgctgtgcgtttctgcaaatgaccatcttgcttgttttatacagacaccatctctgaggaaatgagttattggctggggatggaacctggtttcagggaaaacttctccagcgcgaatacaggagagagcagaagcatcaccctggggcagcaatgccgcctagcaggctgtaggagaagggggctggggcctgggggctgcgtgaccctcggcacccaagggtctctcctcgcagtttccccagcaggttctgcacaggctctcctgggggccagaaggcaatgtgacctcctgcagagaacctgggagtagatgtcaggagactggctccagggccgggccacagggctggacttgctcttcaggcttctctaccctcagttaaccgcatctgtagaatgagtatagcaccctctgcccaatggaattgtttgaggggcttccactggccaatgtctaaaagaactttgtaaatattaagggtttccacatgggattctcattattaaggtacagtgcctgtgggggctgtcttctccctgtccatgtaaggaaattcagggaagcagtgtctgaagttaaaaaagccttgtatttgaagatttcttgtatcaaaagtttatgctaaaacaaaaaccacaaaaaacagaaaacccccaaacttaaagcttcatttatttttaaatgtataatatatgtaattttttttttgcttcagcaaaaaaattttaaattatatatatataaaatttatttatttttgctccagccatagtggttgctagctgtgttctcaatcagcaaaaagtttcttgggtaaatttattgcttgctcaatccttccttgtatttcattagcatattgccactctacacttgtcctgtatttagatatttccttcctctatggtttgttctgtagaacctcaaaaggactctcttatttcttttttttttggacacattatgaaataggaagtctaaaaggctcccagaagaagcatcttcaaaatccacattcagcagttcattttgataatggatatttcagggaatcagtgcatttttgagctggaccagactttcaagacagctgaaacccctcagagctcttagatgaggatattgatgtccagagaagacagggagcaggctgaggtcacccagcaaggtattagagaagacaagatgggaacctgggtcaccggcctgggcctcatattttcaaagtgctatttttttttttcccgtgttttcactttgatcttacttttaatgatagggacgtatcactgtgtcttctcaaaatggtgggtgtgaatggaatttttcaaagttgaatcaatttgagatatttctgaagtttgtttaggaaacaagtatgtgactaccttcctaagagctgactggttttttgaggcctggattgtgtgtgtatgtgcttatgtgtgtgttataaaatggaatcaactataccaggttaaacaaatggacaagtcatggaaaagacacagctctgtttggacattaataagggcgggtgtggaagctggaaagctgagatgccggaaggctcagtgcttagtaggcccggaaaagcaatttttgaactggcatctcattccccttttctaagacaggaaggacggtcagagatgattccaacatgaggactttgctagttgcagtgtctgactcctcccattctcatagcagttttgcacagtagttttggtttgtgtgtatgttttaggcaatgtgacaaagcagttttcctcctgcctccttgagaaatttaatcctgacaggttctttaagaaatcagcttgatgtgggctgattttaaaagaataaatgaaaaaaaaaagctggtgactgatagctgttttattggtcttgtagtgttttggttttgttttatcttcactttcttgtttcctggtgaataataactgggtttattatctctcatggctaatccttaagcctgattccttacctgttccatccagagtacaaagtatattttgactcctctttaaactgcttgttagattctcatatgagtgactttaaatatttttgttttgcttcaggacaacgggaaaaccaaacgattatgttttgtttgcagacagtttacgaaaacagcaaattggtttatggttagaccgtgactttgagctgacttcaagttgggccccacgataaagataaccatggaatacccaagctttcctaagcagagaggatcctggcttccaaatgagcaattttggtcagcaaaggggttatttagctcctaaaagtaatttttgcttgaggttggggctgaggcagagtggctgaacaaccgtaggcctgggtgtagccagaggatcatcagtaattacttctcagttcattcacttcttgggctagggaattattttgagtgcaggataagaggcaattttctgtgtgtttcccttctaatataatgccactgatgatattataattaataggtaacattatgcatgacaggcactgtgtgctaagggttttaatgcattatttcatttggccatttcagaaataccaagaggtaggtgctgttcttgtttatttgtttgtttttttttttgatagggagtcccactctgtcacccaggctggagtgcaatggtgcaatcttggctcaccgcaacctccacctcctgggttcaagtgattctcttacctcagcctcccgagtagctgggattacaggcgtatgccgccatacctggctactttttgtatttttagtagagatggggtttcaccatgttggccaggctggtcttgaactcctgaccgtaggtgatctgcctgccttggcctcacaaagtgcagggattataggcgtgagccactgtgcccggcctttttttttttttgagatgaagtctagctctgttgccaggctggagtacggtggtgtgatcttggttcactgcaacctccgcctcctgggttccagggattctcctgcctcagcctcccaagtacctgggattacaggcacgtgccgccatgcccagttaatttttggatttttattagagacagggtttcagcatgttggccaggatggtcttgatctcctgacctcatgatctgcccacctcggcctcccaaagtgttgggattacaggcgtgagccaccgtgcccggcctgtttttgtttttaagagacagggtcttgctttgtcacccaggctggagtgcagtggtacaaacgtaattcactgcaatctcaacctcctgggctcaagggctcctctcgttttagcctctcaagtatctgggactaaaggcgtgtgctaccattcctggctaatttttttttttaatagagatggtgtctcgctatgttgcccagtctggtcttgaacctctgggctcaagtgatctgcccaccttggctccccaaagtgttgggattacaggcatgaaccactgcacccagccatgtttttattttatctgagagaaaactgaggttcagaacttaactgtatacttctggaatcttcacagagaaataaaaaaaaagaaaaataatttactatagattcattaactactacgtggcggagccagggctgatgtctccactgccccaatttaccatcctgtgctgtaaaaagtcatggagaaggttttctgtgtgcagctaagagaggaggtggcagacatttatttatttatttatttatttatttatttatttatttatttattgagacgaagtctcactctgttgcctgggctggagtgctgtggcacgatctcggctcactgcaacctccatctcccgggttcaagcgattctcctgcctcagcctgctgagtagctgggattacagacgtgcgctaccatgcgcagctaatttttgtatttttagtagagatgaggtttcgccatgttgaccaggctggtcttgaactcccaacctcaggtgatccgcccacctcggcctcccaaagtgctgggattacaggcctgagccaccgcacctggcccagacattttttagacagtcttgctgtgttgcccaggctggactcgaactcctgggtccagttgacatccctcttcatccttccaagtagccaggactgcagggacatgctacctttattttgggttctttgtgtcctaaaccctgtatgatctgctccatttgtaacacagagaacccaggtgccctctttcctgcttatatttctttggggcctcagtttacaaggcaagtctgcctttgtggagatagactggggtctgggatggaaagacctgggtttgggtctttgctctgccactgcataaactcagcaagtcacttaacctctgtgacttctcatttccttatctggaaaatgggactaacacttcctgcttcactgggtggttgagaggatcaaataagatagaaaaggaattgctacgtaacacctaaagcaaggcccaactgctagttgtggctgctgctgttacttggagagaagaaatgaggccccagatcattagttcatatgacaattttttctttttttaagacggagtctcactctgttgcttaggctggagtgcagtggcgtgatctccacttactgcaacctccgcctcccgggttcaagcaattctactgccttagtctcctgagtagctgggactacaggcacgctccgtcatgtctggctagtttttgtattttagttgagacggggtttcaccacattggccaggctggtctttaactcctgacctcaggtgatccacctgccttggcctcccaaagtgctgggattacagtctgagccaccacgcctggcccatatgacaaatatttatgaagtgttttccacagagtagtatggaataactctgggtgtgtgcaagatgaactgagctcagtcacaatacttttttttcccctaatgttaagaattattggctgggcagggtgactcattcctttaatctcagcactttggaaggcagaggtgggaggatcaggtgagcccaggagtttgagaccagcctggatgacaaagtgagaccttgtctatacaaaaaattagctgggcatggtggtgtggacctgtggtcccacctacttgagaggctgagttgggaggatggcttgagccctgggaggttgaagctgcggtgaaccttgatagcgccactgcactccaacccaggcaacagagtgagaccctgtctcaaaaagaaaaaaaataaaaaataatttattttagggggtcttagtaaagaaagacccccaaaagtccatgattttataggtcgaatgaggtgaaaagtggtatcatgataaataaatttgtttaaatatcataaaaagttggtctaaagaaaaacattgggtaaataattatgtgagtatgatgtggttatgaccaaattgtaaagatgatcagtttcttaagtctgggggacaggcactgagcagaggccgtggtggggaacaggagcctgtcttcatggctcttactggccactgggcaagactcagatagcaccaaccaaccagtcacagttgtgatgtaggatgtgactgtgaatgacatccctgctgcccgcttcagagaaagggctgccacttgccagagaaggaatggtgataatgagggacagccagtccctaagtggagatccctgaaagtggtgaatatcttagaccagagaagcccagagcagtttttttaccaccttgtatggctggttttccagtggctttactggtgccccctcggaggacaggggctgtaggaagtttgttattacttccttattagtgacagctgcagtcatcctattgtctcagaatttccctggcatgtaaatggtaggataaggggtggtggtaagcagatggggggcattttgaaaacgaggcagtgtcagctcccacagaaggtctaattttaaacatgcaaataattttcagttccacttttccttcttcctgttagagggaagttgtcccctgttgccatttctgaaacttgggcggacaatgtcgttattgtgttacaaacgatttgcgtctccagggcaggagttgggtgatatttttctgggagcctgtgccagggcgtagcccagtgttatctcatggtttctgagtgaatgagtgagtgagtattaaaacttcatatcaacatggagcctataacacagtggttctgaatctttcttgggggggaaaagaagagatacaagacccctagagagtatagagagtatgtaaaagggaagaatccttccccaaaagggaatgcacatatttacaatattgtatccaatttcagaaggtttttttaaaatttttaattttattgttttttttttgagacacggtctcagtttgtaccccagcgtggagtgcagtggcatgatcttggatctcggctcactgcagcctctgcctcctgacctcaggtgatccacccacctcggcctcccacagtgctgggattacaggtgtgagccaccatgcctgaccatgactagtgttttgatgtgtggatttactacaatttatttgaccattctcctatcaatggacactttagttgttttagtacacctccctgtcccgtcacaaatcatactttgtaatgtttctggtggatatttcttgtaaccttcacaagtttatctgtagagtaaatttctagtttcaggattactggattggaagatgcatgcatttaaaagtgtgattgctgttgtcaggttgtcctccaaaagtgtcccctcagtttgtacctgtatccataggtttggagagtgtctgtttctccataccgtctcatctgaaatgaaaatttttacatgtttgctagtctgaaaggtgaaaaattgtatcttgttttttttttttttttttttttttttgagacggagtcttgctctgttgcccaggctggagtgcagtggcgctgggctcactgcaagctccgcctcccaggttcatgccattctcctgcctcagcctcccgagtagctgggactacaggcgcccgccaccaagcccagctaattttttgtatttttagtagagacgaggtttcaccgtgttagccaggatggtctcgatctcctgaccttgtgatccgcccgcctcggcctcccaaagtgctgggattacaggtgtgagccaccgcgcctggccgtatcttgttatttttatttatatctttaattttgagttagttgagttttttggtcatttgcctctgcttcttcttctttttttgttttctttttttttttgagacagagttttgctcttgttgttcaggctggagtgcaatggcgtgatcttggctcactgcaacctccacctcccaggttcaagtgattctcctgcctcagctttctgagtagctgggattacaggcgtgtgccaccacgcccagctaattttttgtatttttagtagagatgggacttgttccttaggaaccatgttggccaggctggtcttgaactcctgatctcaggtgacccacctgcctcggcctcccaaagtgctgagattacaggcgtgagccactgtgccaggccccattttttgttttttggttaactccctgttcattaaaaaaaaaaaatctatatctatagatagatagatatagatataatctttgttatcaatttgtataagctctttggaaattagtccttcgattgtcatttgtattgcaaacacattccccctcccccatgccaattattttagatgtagcacttgttccttaggaactcagagataaataagaccctagggtggtgaagagagcatagaatttggaacaagactcctttgttggagtcttggctctaccacctcattagctgtgtgatcttgggcaggtatcttgacctttctgatccttgctcttcatattccaaaaatgctaataataggagtacctctgacacagggtagttggagaagctaagtgtgatcatattatgctaaaattccttgtaaatggctatggaaacataaacacagcattttataaaataccacgaggtattccatttactgaagagttacatcagaagagtatttctgattgtgccactgcactccagcctgggcgacagactgagattccatctcaaaaaacaaacaaacaaaaaactagccagtcatttataagaatgagttacagctataggtgcaggcggtaaatactctccaagatatctaaataaattaaaaggctatgtagagaacaatgtatatataatgttacctttaaagtgacaaaaaaaggtgaatatagatacttgtgtatcagaagagagaggtattccatttactgaagagttagggcaaagaccataatattgtaattatcaataattatgaattgtcaaaattatgtcatgaaacctctttttttcttttttttgagggggagtcttgctctgtcacccaggctggattgcagtggtgtgatcctggttcactgcaacctttgcctctgaggttcaagtgattcttctgcctcagcctgggattacaagcatgcgccaccatgcctggctaatttttgtagttttagtagtgacagggtttcatcatgttggccaggctggtctggaactgctgacctcaagtgatctgcctgccttggcctcccaaagtgttgggatttttttttttttttttttggagacggagtctcacccagtcacccaggctggagttcagtggcgcaatcttggctcactgcaagctccacctcccgggttcacgccgttctcctgcctcagcctggctgggactataggcgcccgccactatgcctggctaatttttttgtatttttagtagagacagggtttcattgtgttagccaggatggtctcaatctcctgacctcatgatccgcccgcctcagcctcccaaagtgctgggattacaggcatgagccaccgtgaccggcggaaagtgttgggattacaggtgtgagccaccgcgcccggccccatgaaacctcttatattgggtttgagattaaatccacaatggattgtgtgtattatatatacacacacagacacacgcaaatgtattaaaatgtataatatgaagcagtggaacttccctgatagcacaatttaaatatttcctttttgacaaacgtgcatagttaaataaattaagtgaccaccaggtgtgactgaagagtggccagtgtctattcctagccccgaaggagcacagggatattgactgtgtcccttaaaaaaaacaaaacaaaacgtagggctttctttgtattggtttgaacatttctctttatcttgtgacctggccaactctggctatggctgcctcctgtctctcggtacattttctgtggcggtcaagaggagttattttaagccaccaatgggaaagtttaaagacataatccttggctgtaattgcgggagacgggaggctgagagtctgtgctgacttgccacctgtttccacggcagcaaggtgattgtgcatttcctgctgctggctgaggggccagcaaattttcatgtcgttgtgtcatggggaagttttcctgtctcaatgagagcacaccgtgcttgtggtcttgttcctgtgaccaggacatggagaactatggggagattgttctgggtgtgaagggaaattgctggccagtgcttagtgcacgggctttggagtcagagccaacttctccacctcctacctgtgtgaccttgggcctatccttctaatgcttggagtctcttctgtcctcatctgtatgatggggataacaagaatacctactttataggattgctgtggaggattaaatggatctgcatgacaaatgcttagcatgaaaaaatccctcaacagatattggctgctattttattatcttattgtgctgagacactggcataatttacaattcaaaaattaaatttttttaatcttatactgtagtttacaaggccctttcacatatatgagcttgttcaatcctcacagcgtccttgagtttgtcattgttattgccatttaaaaaggtatgactcagagtggctgtaattgacttgtccaattcaggtttcatctgtcttttgcagaataataatcatgtacgttcatagtataggccacctctttttttttttgttttttaagacatagtctcgccctgtcacccaggctggagtgcagtggtgcgatctcagctcactgtaacctccgccttctgggttcaagcgattcttgtgcctcagcctcctgagtagctggcattacaggagcccgcccaccatgcctagctaatttttgtatttttagtagagacagggtttcaccatgttggccaggctggtctggaactcctgaccttgtgatctgcctgccttggcctcccaaagtgctggaattacaggtgtgagtcaccgcgcccaagtataggccacttttaagaattactcagagttagcttataagaggcgaatcagtggagtcctccagtttggttcacacataattattaggttgaaccatataaagttactgtttttggtcctgtgaatattagtatttatatatggttccaatctgatatgttccagaaaatacacacttaagtaaagtttggaaaaccaaatcatagacttacatactgtaaggcggtgtatttgaaactgggatgtaaaatcaatttagtgagttatgacctgcattaaaaaaatggtagaatatcagagtttgctggtaagtattgtaaaaataccagagtttgctggtgagtattgtccatttcagttatatatgtgcgcacgtgtgtgtggtgtgtatgtgtgtatactaaattgcatataaaatgaatttcttatcatgggttcacctgttgccagaaaacactggaagtcactgttccagggaatggaatggtggaagatgcctggtgggggatggaggtggattctgtttccagacacagtaaaaaaaaccagtataaagtccccaattatgcattgtcagtgtctctatgtgtagctggaaaccattcctgcagcaggtaagcaggaagaaccaaattgtcgagaggcacttcaggaagggaagtgggccgactgaaagctttggaggcctgcctttaagtagctgcttttctggaaacttcagggtgaccagcctagtgaacaagctatgggtcagcgttgtgtgttcctttggtaaatggatttggtagagagctaacactactgcatttgtagtttatttgtttgtttgttttctttttgagacgagtctcactctgtcacccaggctggagtgcagtgttgcgatctcggctccctgcagcctccacctcctgggtttaagtgatcctcctgcctcagcctcctgagaagctgggattacagatgtgcaccaccacacccagctagtttttgtatttttagtagagacggggtttcatcatgttggccaggctggtgttgaactcccgacctcaagtgatcctcccatcttggcctcccaaagtgctggggctatagggctgagtcaccgtacccagcctgcgtctgtagtttaaatgataacttaatgaccaccatccagtagctgaggctctaagagggaggtctgaatagtgggtgactcagctcagccctgcctgacctctagctctaggctgtgctgtctctaggctccggcactgatttgcatgggcctgaatgaaccttctggagattgttagcccaactggctgaaggatcctgatccccaggttaatttgattcccatcaaacagttcatttttttttttttttgagaggcagtctcgctctgttgcccaggctggagtgcggtggtgggatcttggcccactgcaagctctgcctcccgggttcaagcagttctcctgcctctgcctcctgggttcaagcagttctcctgcctcagcctcctgagtagctgggactatatgtgcaggccgccacacccggctagttttttgtattttagtagagacggggtttcaccatgttttccaggctggtcgtgaactcttgagctccggcaatccacccgctgcagtctcccaaagtgctgggattacagttgtgagccactgtgcctggcctttttttttttttaatataaaaaaattgaaaatacagataaaaggaaacaaaattacctgtaatctccactcatccaggttaactcctggtacctttttgatgcgatttctttgtctttttaaatgcatgttctgtctatttatactacaataggataacctcctacatgtgctttgtaacttacatcttttaatttttaacagttgaggtgggccgggcaccgtggctcatacctgtaatctcagcaccttgggaggccaaggcaggcggattgcctgagctcaggagttagagaccaccctgagcaacatggtgaaaccctgtctctactaaaatacaaaaaattagtggtggtgcacgcttgtggtcccagctgtttgggaggctgaggcatgagcatcacttgagccctggaggtggaggttgcttgagtcctggaggcggagtgagccaagattgcgccactgcacttcagcttgggctgcagggtgagattctgtctcaaaaaaataaataaataaataaataaaataaaaaaacaattgaggtggatgtctccctaggggtaccccaggaagccacaggataaaaagcaggcatcttgctggagggtctctgttgctcagtagaaattattttgtaatgttttttgaaaaccacaaacatggacatattatggactggataccacatttgcatcaggatttttttttcaaccagtacagtacataacaaagaaatctctaccctgcagaccctctgggggtgtgagagcgctccttgctattctcagggtcaatgtatggcaatctgtgaaggactgacaatatattgcaaacgtttccccctgccagtaaatattcttcttttgtataactgttagctgttgcatccattccattatgtggaggtaccttaatttatctaataagtcctgtgattagtcttatagtttgttttcaaaattttttttgtcacgataggccctattcagttgactttgtgatcagctctgaacatataatctggtgattgccttaagataaattgaataataaaagtaacaatagtagctaccatcggttgaatatttatcatcaactgttgtgagcacgttgtacatattaactcatttaatcctatgacgtaggtatagggaaggaaactgaggctcagaacctctgccagctagttgtgggcttcctttgaggcacaggggagctgaatgggagggtctacataggacagggcgtgtctgagtccaggaaggacagctggacttgggccagtctcacaggtgggaaggctgtctttctgtgaggatgggtgacttgttgacctttgatcctcagagccctgatgcagcaggagtgaaatgattcccagagccacagaaaacaagagtatctttgtcttggattttagatcctggagctatcaggtggtaagaaggctgtctgacccagattaagtgatgtcatggtatcatgttggggtgtgggccttcctgttgtaaattatttgggatttcatagagatcgaagtcatgtgtggatgacatgacttcaggatgtcccattagaagaggaacgtgggggtcaggcgtggtggctcacgccagtagtcccagcactttgggaggctgaggcgggcggatcacgaggtcaggagttcaggaccagcctgaccaacatggtgaaaccctgtctctactaaaaatacaaaaattaacagggtgtggtggcacatgcctgtaatcccagctactcgggaggctgaggcaggagaagtgcttgagcccgggaggcacaggttgtggtgacctgagattgtgccattgcacttcagcctgggcaacaagaatgaaactccatctccaaaaaaaaaaaaggctgggtgcggtggcttacgcctgtaatcccagcactatgggaggccaaggcgggtggatcacaaggtcaggagatcgagaccatcctggctaacacggtgaaaccccatctctactaaaaatacaaaaaaaattagctgggcatggtggtgggtgcatgtagtcccagctactcgggaggctgaggcaggagaatggcgtgaacccgggaggcggagcttgcagtgagccaagatcgcaccactgcactccagcctgggggacagagcgagactctgtctcaaaaaaaaaaaaaaaaaaaaaagaggaacttgggaaagagcatgggctttggtgtcagcagaagcatgtgtccagttccatgctcttcccttatagctgtgtgaccctgctatctgcacagggacttgagcctctcagaatctgttactgcatctggaaaatggaaatctggaaatgtcactgcatctgtagcaacaaccaggccattttgttactaggtttaagtgagggaaggcatgtaaggcactcagtccagatcatggcacttagtaggcctgagcacatttgctcccacctcagtgacctccttgttaacacgacatctcctgactttggggctgcagagtgatgcagagcactggccagtgttgccatgcacccagggtgcagggagacctgtcttgcaggtgttcaaacaacttttgtcagcctcagtgtcagggacttttgttgcgtagagcagtcaccaaatcctatggtgagaagagaaatcgttggagatgggggtgcaggggtggaagctcttatttcagaagacctgttgtgaggtaagactcagaccctcagcttctatccggccacagagtttgggaccagcctttcgatgtcttttggaagatgcacatggaatgcttagcctttgctcttccctggaacctggcttaggctttgcacctatcccaccatgtggttggggtgagtgaggacaacttcttttcctccagaacatggtttctccatctcagccctattgacattttgggctggataactcgctgttttgggaggctgtcctgtgtgccccgtaggatgtcctgcagcctccctggcctctgcctgctaggagccagtagcgccccctcccccacagacaaaaatgtctccagatattggcagatgtcccctaaagggcaaactacccttgctgtaggtaatacttgctttgaagtactggtgtggatggcctatgccctggcagtcttactaggtgggactggctgtcctctcattctcatgggattggcctcatgctggtagctgacttcctccccgtgagaccgtaggtctaaactaacaaggtttacacatgtgacaaacatccaggttgccagggctcaaaagagggttcacatcgactcccttctcattcactgagtcctttttcgggagctttggccgagtttgtgctgcgtctgggcatctaggtgtcgagttcttccctagtgttttcagcctcggcttcctcctctgtaaaatgggagtaactgatacttttcctgtctgggtgggaaaggaaccccgtgctaatgtgattgatggtgtggtgctaagctctgctgcaagggatgtgaagttgagggaaaggtttaccatttattaggagctttgagaccaagttccttccacacaagagatatgccctgtcaaagggagatcccattgcaaagagattcactgccaagttccccctcccactagctccctggagcaattttcagcttttagagtgtttagaggcctcagggtgtaaagcgagagagagaatgccttccagccagcgagagagaatgccttccagccggtgacattgagaatagcaggaaagaggcagaagaagaaactgacttgaagggtgatgccagccaggggtgagtggagtgaggtaggatttgctttctgaaaactgggatgtgcacacaacctatcaagaatacttcactttgtgaggcccaaaaacagctcctagcacagtgtagagcagacttggtcagaacttcaatccttgatttttttttttttttaacccgaatttcatgaggtttttctgagacatccactggactgtcatataccgtgtgctgggctctcattttatccttacaattattatgttcattttaaagacctcatgttagctagatcagtagggtgactacagtttacagtaatctactgtatatttcaaaatagctagaagagaacaatttggttctagcataaagaaaagacaaatatttaaggtgatacatatcccaagtacattgatttgatctttacaaattgtgtgaatgtattaaattaccacatgtgctccaaaactgtgttcttgaaaaaattatcacgcccattttagagatgaggcacagagaggtggagggacttgcccagatccaggtatgtggctctcctgtaatctcgcttctattgctttgtgatcagcagcaacttagtagctttcaaagcttcaattttcttgtgtgccaaatggggctaataaataccttagaggattgtgatcaagattccgtgaaaaaatgtatgcagtgcccccggcaaggtgcctggcatacagaaagtgctctgtacgcaccagctgctgtcattattattgtttcaactaccagtgatcataaaggatgcctgctttgatgagcttttccaggaatatggactggtctgccctgatctacttgaataatctgtctcaggccctattcggtaaatacatgtaggaggtgcagctgccagggaagggagggatgttacctggagaggacagagtctgaagttcaggaaatacagcaagagccttcctcagggatgaaacatgtgatcttatggtctgactagcctcaagccagctgagctcattgccatgcaacttggtagttaatgattgctagtaagaagtttaaaaggatcatcccctcaaagaatgtcagagttggaaaagaccttagggacattaggctaggaaagacaatgtcctagtgagtgactgcttgggccctgtatagaagggattctcagatcacttgggatgtcctggctcagcaggaggctaaggtgggatcaattagtgatgtctgccatggccacaagagaggcaaggagtggcacatgtgctgtttatttgctgtctttggctgcagctgaggacactgaggcccaagacttgcttgcttactggacgatcacccaagtcattaaaccacaaaaatctcttttggaaggaatctgttaagaatgtctgattataagagttgcacctttgagcaagtattttttgcttgatagtcttcagtgaggaggaactgtcttcaaagagcacattctgtcttttggcaattctcccaattagaacttagaccactgaggtagaaaggccttagaagcccctttaagtgggctcttctcaactggggctgcacctgagaagcttttggaaaataccagttggaggctccctccccagaccagtggattctggatatctgggtgtatggacacctcttgcccccattggtgttttattttccaagctcctcatgtgttgttaatatgtagccagggttgagaaccactgagaccaaaactctttggaaacagagacccagaaagggagaacatgattgtctatgggtatgtagggctagtggcacaaggagaaggaaaactaggggggaaaaggcctttatcaaatgccacccatatgctagtctcttttactttcatgccgagattcttctttttttttttgagtcagagtctcgctctgtcacccaggctggagtgcagtggtgcgatctcggctcactgcaacctccgccttctgggctcaagtgattctcttgcctcagcctcctgagtatctgggagtacaggcttgtgccaccacagctggctaaattttttgtatttttagtagagatggggtttcaccatgttggccaggctggtcttgccctcctcacctcagctgatctgcctgccttggcctcccaaagtgctggtatgcctggcccttttttttttttttttttgagatagggtcgtgttctgttgcccaggctggagtgcagtggtgtgatcacagctcattgcagcctcaacttcctgggctcaagcgatcctcctaccttacctgcctgagtagctgggactacagatgtgtgccacctctcctgggtaattttaaaattttttttttgtagagatgggggtctcactatgttgccacagctggcctccaagtcctgggctcaaacgatcctcccgtcttggcctcccaaagtgctaagattataggtgcaagccacctctcctggcttgcttctttcccgtaaattgaggtgtgttattccactgcttaaaagcctacatggcttcatatcgctgttagtataaacccaaacagtggtctgcaagactctgaaccttagatcaggatgatcagacccctccctcccctccaccctccgacctcatcctggctacccactccctgttcacagactacagtcacctggctctagtacaacagacacttgaacctaccccgcccctctccctcagggcctggtactatcctcctcgctccttcttatcactcaggcccctctatcccatcatcctccttcatttcctcccatccttatcacctactcatttctgtctgtctccccacctcttggattatgagttcaggggagtgggaccccctatgtctgatttccttatgtgtaggacagagcgtgcctcaaaagcatgcttgcttggtgaatgaattgaaagaaccaccctgacatggagctggtattatccacaggttacaatggactggacctcctcttccagtcccatataattttttttttttttttttttttttaaattttgagacagagtctcactctgtcgcccaggctcgagtacagtggtgatcttggtttactgcaacctctgcctcccaggttcaagcaattctcggtcctcagcctccccagtagttgggactacaggcatgtgccattacacctagctagtttttgtgttttcgtagaaacaaggtttcaccatgtttgccaggctggtcttgaactcctggacttaagtgatctgcctgccttggcatcccaaagtggtgagattacaggcatgagccattgtacctggccccatatcacttcttattatctcataatattcttaccttttgcagtgacagccccaaagtgtgtgtgtgtgtgtgtgtgtgtgtgtgtgtgtgtgtgtgtgtttggggtggggatcataataatcctgcaggtggggtttagctctggtgaaaagagcacagatcctttgatttgggtttgaatcccagcacttcctcttactaagctgtgtgatcttgggacattactaacctctgtgaggttcagtttttcttggctgcaaaatgtaagcacaatactaataagtaactgacagatgctgtgcttctgccagacactgtacccagtgctttgtgtgtattggctgagtgaatcctcatgacaccctaatgaggtaggtctcttctcttcttgctttcattttacaggagaggaaaatgagatgcagagaagctaagcaaccagcctgaggccacacagccaatcagttgagagtcagagttcaagcctaggctgcttgctgccagagtcagagtgttaggtaggactttatgaaatcatgcccacaggccccggaacaggtagtggtgcagacacttggtaaaccgtagttacccctcccactttgacatttactctcctggtgacatttaagttttctgactgttttgttgttcaagttggtgacaaaagtaccaatttcctgcctgctcacttccaaacacagcttctgttgatgagaactaagggagtacaacttttcaggccgggggtgtgcatggtgttttgggccttggtgctcaggaagtgtgggcactcccttaaattttttaaatgggcaaatgagtgcattttcctatttaaatttttttttttttttttttgagacagagtctcgctctgtcacccaggctggagtgcggtggcgccatctcagctcactgcaacctctgcttcccgggttcaagtgattcttgtgcctcagcctcccgagtagctgggattacaggaggctgccgccacacctggctagtttttgtgtttttagtagagatggggtttcaccatgttggccaggatggtctggaactcctgacctcaactgatctgcccacctcggcctcccaaaatgctgggattacaggcatgagccaccatgcctagcctcactcccttaaatttttaaaatgggtaaatgagtgcattttcccatttgaaacattttctgcttcaaatccttattgagcactttgtgctaggcattgtgactatgatcagtataaaaaccccaagaaaacaaaaaaacaaaaacagtaattcactgtcctgtcacccccaactcatcaatcctttgcttttccataactggttacctgggtgcttttcttcgttgtgattattttttattggaaatgcagatttgtgactgtgatgggcctgaggtcaggtcaccttgctgaggcgagtttcctgggcggctttgccctgttttgataaacagaagaatgagcagctggagctgcatttcaagtggctgctttagttgaggcaggcaggcctcagtgtttatgtgacaccgagcagcttcaaaatgagcttggtcatttaaaaaaatttattttttcctagttaggtaacagtggtataacaacattaaaagaaatgtagaaactagagaaaggaaaaaaaaaagccctttatcccccccatcacaaaactattataatttcaaaatagttacaagtacaatgtattccaagtggcttcttatttaagataattatattcacagagcagggaccgtttcaggtcctttaatgctgaaaggctaaataaagagaactttttattttttccatgttaatacatggatgatattaaccatgatgtttaatagctacagaatactgcatgaaatggatgtactataattcatttagcctttttcgtatttagagatttaagcagtagccaatttttcaccattacaagtggtgcaaggaccaatatcttcatgaatacagcattttctgtaaagcagaaattctttcttcaggattaatttccagatatctttctggtattagacacataccacttgcctaataacgttccaaaaggaattcattgtttacattgctattagaacatatgagattgcctgtttcattatgtccgtcccagcactgggtattatcattaaaaaaaaaagattttaaatttatttattgagttatttacttgagacagagttttgcttgtctcccaggctggagtgctgtggcacgatcttggttcactgcaacgtccgcctcccaggttcaagcgattctcctgcctcagccttccaaatagctgggattataggcacccaccaccatgcccagctaatttttgtatttgtagtaaagatggggtttcatcatgatggccaggctggtctcgaactcctgaccacagatgatccacccaccttggctcctcaaagtgttgggattacaggcgtgagccaccgtgcccagccaatattttaaatttaatgtttacatttgcacacatgccaattgggcttcatggtggctgcctcacaccactttttgtccgtgtgtgagactcacatagaggctgttttctgtgatccttttttaaaaaataattacatttttttaatgctcagggaaaatgtcaaataattgtttatgttttgtactgaaatctgcactggtctgatggtacccagaaaaactcttaactgtagccagaaaccagctgagcctagttgtatgcaacctgactgcaaaggtcatcaggtgctctcattttatttttagagctatattttagctctaacgtgattgttgggtgaacacttgcagaatgaaatatgactgacacctaccagctgtctacacattcctggttatatcttaggaaggcagtgtgtgctagcaccttgggaagagaatgttgagttcaaatcctagttttgccccttgcaccaataccttgatcagattcctcccctgcgtcctccctaccctttcttcaacttcacaccttagtttctttacttgtaaattgggttgatagtgggctgctgtcagaattaaggacatcgttttgtcaaggattttgcatacaggaagtcatggtgacagctgttgttactgttgtcctgaggagtggggacaggagaggaggaaaacaggctggtccaggtgtctttccttaaaggaggctccagcttagttggggagatagatgggctggtcagagtttcaagtcataggcagtgcaggcctcaaaggaacagccaggacttgagacaagaatcaggccaagtgagtaactgttgctgctgtggcagtgaatgttagcagcccaggcctgcaggggggaagactcatttggggtacagtgagaggtcttgctgggcaaatgcagggtgtttgcggcaaggtaggctggggctggacttggaggatgcctgcgtgatttagattctatcttgtagagaatgaggtatcatggaaggattttcttttcatgttgtaaatattaatcattttattgttttgtatttttgatggcaatataaaaataccagctttgttgagatataatttacatacagtaaaattcatccatttagaaagtatacagttcaaagctgggcgcagtggctcatgcctgtaatctcagcactttgggaggctgaggtgggtggatcacttgaggtcaggagttcaagatcagcatggccaacatgatgaaaccccgtctctactaaaaatacaaaaattagccaggcatggtggtgggtgcctctaatcccacctgcttgcgaggctgaggctggagaatcacttgaacctgggaggtggaggttgcagtgagcagagatcatgccactgcactccagcctggacgacagagtgagactctatcttaaaaaaaaaaaaagcatacagttcagttgtttttagtatattcagaattgtgcaaccatcactgctgtctagttccagaatattttcgttactcacaaaagaaaccccatgcccacgagtgctcactcctgatttctccctcccccacctcctggcaaccaccaatttgctttctgtttctgtgaatttacctgttctatgtatttcatgtgagtagaatcatacactgtgtgtccttttgattctggctatttcgcctagcatagtgttttcaaggtccatccatgttggagcaggtatcactgctttgttctttttttatggctgaatgatatttcatcacagagagataccatgttttgtttatccttttatgagctgatggtcgtttgggtcatttctactttttggctattgtgagtgacactgctatgaacgtttgtctaccagtgtttgtgtggccacgggttttcaatgtgggaggattttgaactggggagtggtgtttggagcctttgggtggggtgggctgtgaggagcctgtgtgtgtgtctgcccttactgggctgggtttagggcaagcttcatgtgcttcctttcttttaagggactctctgagacagggttattatcccctttttgcagatgagggcactcaggctcagtgaggttaaataagctgcatggctagacaatggcagatagcagccctgtccggctcttagccagcttgcagccacctgcccctgctgggccaggcgattgcagtggtcttggctgggaggggcccagaggctgtgtggtgctggagagaggcagcaggctggacctggttgggcaaggctgagtggttgtgggataagaggagatgtttcagagcagcacccacagaaccgctgtgatgggagaaacaagacttcgagttaggagagtgggttggactcttggtgcagcctatgtgaccttgggctgatcttgtctcttttgagcatcactttcctcatctggaacctggggctcttgtggcttcctgcctctctcaagggtgattcgggaggaagagtgggagagagagagagagagggagaggatggaggcgagagaggtggagtgggaaaggagggcagaatctgctagaacctgcagagctcataatctaggggcggggagggacatgcagcaggtgcaggcaggtgtgggaggaagtagcctggtcatctggatggacatccctgcccattcagagaagctctgaaccctgcaaaagctcccacgtggaggccagtgagctggttataatccagagactgtcagtttttcctagtacatatttggacctgagcctttgtttctgcaaagagtctggtactgactcacacagtgtcagcagcccccttccatcccctggcacacccctccctcattcctactgagcattaccttaaaaccagtgaggtctttctgggtcttaaaggtcacccagtgtccttgcctatctgggcctgtctctgttcaagtggcaaggcggaccatcccctttatcactgacttgcagcttgcctgggttttgtaaaaagcttgtcattgccagttagaaaataaagacagaaacctcccctttggcattggtatcgtgatgacttgctcttgttctgactctattttgctggcttgttatgagtcagtcatttttttttaatgaaatgaatacctttgtcttaatatgaagctaggcatatatgataaaggttagatgatttttcaaatatgaaatcagaattctacccatactcccaaattagagagcagtctgatgtgttcccctttactgtgaccagtggcttcataggggacctagttatgagtcctgtttcttttttttttctttttttattttgagactgagtctcgctttgtctcccaggctggagtgcagtggcgcaatctctgctcactgcaagctccgcctcccgggttcacgccattctcctgcctcagcctcccgagtagctgggactacaggtgcctgccaccacgcccggctaattttttgtattttttttttttttagtagagatgggttttcaccatgttagccaggttggtctcgatctcctgacgtcgtgatccgcccacctcggcctcccaaagtgctgggattacaggcatgagccaccacacggggccaggcctttttcttttcttttttttttcctcactgtgtcacccagactgtagtgcagtggcacaatcttggtgcaacctccgtctcccaggttcaagcgattcttgtgcctcagcctcctgagtagctgggattacaagcatgtgccaccacacctggctaatttttctatttttagcagagatggggttttgccatgctggccagggtgatcttgaactccagacctcaagtgatctgcccgcctcccagaatgctgggattacaggtgtgagccactgcacccggctgaggcctttttcttctgtgcgttcctgctgtcttccctccaggcagcagcaagctggtaggagctgtacttgtgagttgacatcatgatgtacagtcactggtcacttataaaactgggcaggcccagagcaggaagggtcattgagggtcatctaatgcaaaccgtttactttagagatgttgaaaccaaggcgcagagaggggaagtgacttgcccaagaccacacagctaatatcactgtgagcccaggttcctggctccagttcctggttctttctgcccccttcttcccgacactaaagatacagtggtgagcacacagggtattcagtaacgtatctatttttgacctgtttttaatggaggctgaattgggcttttagggttgagttctgacacgtgccaggtgatctgctggagggaaatctgttacttctggggaagagttgaaggtgtcttctgaactctggaatctgttttgaggggaggctgagcccatgcgtggacccttaggctgagcccatgcctgcttcagatgttccacacctttcaccacaatttatttatttatttattttttgagacggagtctcgctctgtggcccaggctggagtgcagtggcgtgatcttggctcactgcaacctccgcctcctgggtttaagcaattctctgcctcatcctcccgagtagcagggattacaggcatgtgccaccacgcccagctaatttttgtatttttagtagagacggggtttcaccatcttggccaggctggtcttgaacttctgacctcgtgatccaactgcctcggcctcccaaagtgctgggattacaggcgtgagccaccatgcctggcctatttatttattttttatttttttgagttgaagttttgctcttgttgcccaggctggagtgcaatggtgtggtcttggctcactgcaacctccgcctcccaggttcaagcgattctcctgcctcagtctcccaagtagctgagattacaggcatgcgccaccacgcccggctaatttttgtatttttcatagaggtggggtttcaccatgttggccaggctgatctagaactcctgatctcaggtgatccacccacctcagcttcccaaagtgctaggattacagtcgtgagccaccatgcctggccacaccccggtttattgcatttgcttctaatagagaaatcaacccagtaaacaaatgaattattgttagcaaaactggggggtgggttgggaaaggaaagtagttccttctataataaaacttgctgatatttcgttgaaagtcattgtcttactcatccttgtataagataagtcacacaatgagtggtatcagggttgcagggtttccccctgtgaggacacaatgggatgaaccgtgtgtgggatggtctgttaaagaaaaacaagaagccatgtgttggaaacaacctaagtattgagcggtggaggattgctgaaattgtggactactatgcagtcattaccaacgcactgaaaaaatgttccatgatatggcaggatgtttatgctataagaaatttaaagacgcgagcttcaaagtaaagtataaacctaatttggtcaaacaggctgggcgcagtggctcacgactgtaatcctagcactttgggaggccgaggcaggtgggtcgttggaggtcaggagttcgagaccatcctggccagtatggcgagaccccatctctactaaaaatacaaaaactagctgggtatggtggctcatgcctgtaatcccagctactcaggggtctgaggcagaaggatcacttgaacctgggaggcggagggtgtagcgagccgagattgtgccactgcactccagcctgggcaatagagcgagactctgtctcaaaaaaaaaatattggttaaagaaacaaacgttagacttgaagccgtgctttatatggatatgtggtgcactataatgtggtgcttaaaaagcaacttaggcagacctgggccaagtctgggctctgccacgtaactgctatgtgcccctgggcaagtcactggatctttcccagttcaggcttctcagctgttaagtgggactagtaccttatctctttgggttgttgtgagaattaaatgagctatctgggctttcagagaaagggcttcatgtgccgtggctctgatcagaccaaacaagttatctactgctctaagccatcaaggccccccatgcctgttggatactgttgagttatttgggttggcatgtagtgcagcgtttctggacatacatactctggggactccccatcccaaatttcttacagtctctccagtgtgccacacgctttcttgccactaggtccttgcatgtgatggagtaactcttgtacctctgtctccctaaatagacggggttctccaaggacatcgtgccacagggcctggtaacccagtaggtgctcagtaatttatttatttatttattttttttgagacagagtctagctctgtcgcccaggctggagtagagtggcgttatcacggctcactgcaacctcccactcccagcttcaagcagtcctcctgcctcagcctcctgagtagctgggattacaggcgggtgccaccacgcccggcttattttttatatttttagtagagatagggtttcgccatgttggccaggctggtctcaaactcctgacctcaagtgatccgcccgtctcagcctcccaaagtgctgggattacagggtgaaccactgcgcggcccattaggtgctcagtaatttgttgaatgaattgaagacatgggacttgagttaggcttttattattattattattttttgagacggagtctcactctgtcacccagtctgggagtgcagtggcgtgatcttggcgcactgcaacctccgcctcctgggttcaagtgattctcctgtcttagcttcttgagtagctgggattacaggcatgccaccacgcccaggtaatttttgtatttttagtagagatgaggtttcatcatgttggccaggctggtctcgaactcctgacctcaggtgatccacctgccttggcctcctaaagtgctggaaatataggtgtgagccaccatgcctggcctattattattattattattattattttggagatagggtttttctgtgtggctcaggctggacttgaattcctgagcccaagtcatccttccgcttcagccaattgagtagctgggattacaggtgcactgtccctcccagcaagttgggtctttaaataaagagtggggtttggtgagcagggtgggtgcactgttctaggaggtgggcaggacagaggtcagtggtggtccctactgcctattcagggaccagggcccctgggcaaaggcagagataacattggcacaatctgcctttcagctttcattgtcatgcgggagtcaccatgctttgtaagacatttaatctataagacttgattagttttgctacctttcatagcttggggctgtgtatgcctgtttgtaagagagatccatccagatcaagcctgtgcagcaataatgtatgtgcacaaggcctcttgtgttgtgctgatggtaagataggagctggacttggaggcaggaggtggcctgggttctgtttctggacttaccacttactagacgggtactcttgagtggagtcacttaagaaagtaatgccgatcaggggctcagagtgtcccaagtgttttctcttgccttattctcattaaacagaagtacagctcagaatatgatgggccagtcttatgtgattggtgttaataaggcagtagagagttgggggtactctggcagaccatgagaacctgccctgtttgaaggagaatgctgcctcctcttcctccttttaaaattcacacatatgatgctcactaagtgtctggcacccttttttctttttctttttggggcagagtcttgctctgttgcccaggctggagtgcagtagcacaaacacacctcacttactgcagcctcaaactccctggctttaagtgatcctcccacctcagccttccaagtatctgggaccacaggcacatgtcaccacacctggctaattaaaaacatttttttgtagaaatgaggtcttaccaggtcgcccaggctgatcgtgaactcctgggctcaggtgatcctcctgtcttggcctcccaaagtgctgacattataggtgtgagccactgtgccccgcctcagtttttaaaaatacttgcttaaggagagagcactgaaggaagatttagatctgctctgttgaagtgacagagtacggtggtttccatttatgcgtattttgtagttcggatggcttcttgtggggagtcctgtgagttcacacttgggggcatggtgtgggggacctgtgaagtgggtgttctggggtgagtgcgatgctagtcactgtcccagttttcttctcatttctttttttgtgagtgcttggctagtggcagccttgcagatcagctagttttgacccacatcctccctctaagtggtgctcattgaattgagccacagccccaaggtcatgttttcaaggttggcatttgggaggccttgtcagaaggtcttataccatattccagtcacccaaagtgctgcccgccatgcctgttcgttcagcaggatttccctgagcacctgctctgtgccaagccctatgctaagcaccaagggagtaaatatggagggcagtgtccccagagtccaggaactcgtgatctagtcggggaggagaggggtacctactctgtcttttacacagcaagtgtaacctctgaagaatgatgttccaggaggcaagagcaaccctggcggactggtggagctgggaagggaaagatgcttctggaggggccttgggagaagagtcctccagggtgagccccttgagagaggtttcagagctctcatccatcttcatatcctggcacttagcccaggcactaaaatttgcatatttttgatggcaattaaaaaaatactagctttactgagatataattcacatacagtaaaattcacccatttaaaaagtatacagttcaaggttaggcacggtagctcatgcctgtaatcccagcactttgggaggctgaggcaggtggatcacctgaggtcaggagcttgagaccaacctggccaacatcgtgaaaccccatctctactaaaaatacaaaaattaaccgggtgtggtggtgtgtgcctgtaatcgtagctacttgggaggtggagacaggagaatttcttgaaccgggtgggggaagttgcagtgggctgagattgtgccactgcactccagcctgggcaacagagtgagactctgtgtcaaaaaaaaaaaaaaaaaaaaggttccattcaagatgtcaagccccacgggactgagggtaacatgagggtaacagacaggtgatgttaaattccatttgggctcatgttcacccccaggccccttattttctttcaaacacatggaatgggcatttagaactaggaagatcatgaatctggtggctgtgtagatgccataccaggtatggaccacaggcttggagcgcagcagcatacaggggtcagaggtcaaggccagtggtctatcagaacccagttcctgcaggagccagtgccggtactaggtagactcagatgactgaatggtcctcgggatctgaaggccagtgggggagatgaggcctggcctcccggaagtgctcagtaaacatttgttaatcatttcctgcctagggaagctctgtggtatgctcaggagaatcttgcttctcatgggggaatgggtggttgtcatttgggtggcctgactgccagcctgcttgctggctctctgggagttggggtggtggcatcaacctgcagaggcggggcagtggggcagctcacggctgtgtgggtaagtaagcagtgagcacagtgagggagctgttgccaggagcctcttggcttagtgagccaagcagaaccatgtgatgcaccctgtgggcggccacctggggactcaggacatgcacccagatccctcctcccctacccacttcaaagaaagtgctgccctcccagtggtgatgaagaccttccgctggccccagcctctgggatctggcctttacttgggtattcatgtggccctgggggttggctttgctgaagttgggcagagcaggtgggttctggaatgtgcaggggcaaccagagtgtccatctgtttgggtgaagccagctgtttaggtctgaaggatctgtttgatttttagaaacatgatgtgttccagagttagtaggtggtggtgatggagggtattggcgtgaagagtgtggatgctcttcgttcctttgctgttttgggactatctctctatggggtagtggcccctttccttgttaggatcatttagaaccccctgggatcatgagaatgaatgtgggtctatccttccttctgtgtgaggaaaaggggaggtattgtggttaagcaagtttggagaactctggcctgaacaaaatcaaacagatgtctttcttgcaggacttagaagaaacttaaatctgttggtaactctttaagagggaaggggatataaaacccttgttttccctagatttttgttttactctatagctgtctctttttagaagcatctcatgagactaatgtttttaggaacctgctgtaggaaattcatttattcaaaaaatatttgttgagcatctgttatgtgctagtgactgctccaggtgcttgggatacagcagtgaccacctccaaccaagatcccgctttcaagaacttccattctagcagaagtgatgaactcatttttatggagcacctactgtgtattaggcatgtgagttatcacacattatctgctttacccctcacaacagcctggtgaggtagatggactattttattttattttattttatgacagtgtttcactcttgttacccaggctggagtacagtggcgcaatctcggctcactgcaacctccagcctccaccaggttcaagcgattctcctgcctcagcctctcgagtagctgggattacaggcatgcgccaccatgcccggctaatttttttgtagtttttagtacaaatggggtttcaccatgttggctaggctggtctcgagctcctgacctcaggtgatctgcctgccttggcctcccaaagtggtgggattacaggtgtgagccactgtcccaggccagatggaccattttaaagattaggtaactgagctctaggggtcaagagacttggccactttggcagctgcattgtcgtttttggattatgtcatcaaattgcaaggggaggtggtgaaataaggaatttctgcaacagaaattggagtctgcggtggggatgctgcaggccttagctgctgtatcactgtgtccgtttatgaaggcccgatggagaagaggctctgaatcaggccgggaaagaggtatttctctggaacaactggtttgtttctgtgttatgggcaccgagaagcgtgtggctcatcatgttttcctttggctttggttactaagcacctgagagctagatttgtggcccatcttgacacttctgcaggatgggaccatatggcatgcatttctatgtgctgatcttaccccaacctcccgccctccatcccgctttattattttctctatactcatttttgccttgcctggttctcttgtttgttttattcttttgtgttatttgtattattctaaaccaccacatatacttggtgggatggagctgggtatagttaaattttaaaaataatggtgagggccaggtgtggtggtttatgcctgtaatcccagcactttgggaggctgaggcaggtggatcacttgaggtcaggagttcaagaccagtgtggccagcatggtgaaattagccgagtatggtagcgtgcacctgtaatcccagctactcgggaggctgaggcaggagaatcccttgaacctggtggaggtcggaggttgcagtgagccaagatcatgccactgcactccagcctgggcaacagagtgagactctgtctcaaaaaaaaaaaaaaaaaaaaaagaaataatactaatgatgagatgacttgcataagatcccccagctactctgtggggaagtcgggctccaagccagctctcctggccccaccctctttccaacatactcagtgcctttctggattaggatccactgcaaggttcctttgcagtgggagccaggtctgtttggcttttgcagccattgtgttatgggttccagtggaagctgggctggctggattggaggtgttgaggggcttggattgacctaagtgtcacctgtggctcaagcaaggctctggactgtggattccttcttggtgagggctgttcagcctcacccaggagagaacccatacctctgcttcttgcttgtgaggcatcaggtttcaagcaggggtcagaccagatgagcactgttatgttcttcacagctgcttcccactcgttatcctcatagtagcccagggtagaaaaggagaggatgagtgggtggtattgatgaagaaacggagacctacagaggtgaaatgacttcacccaccaggtgatggctgagtctgcaacccaacaaaaaactctggcttgctggcatttctcaggccagacagttccaatgtgaacccacggtaccttctgcgggagaaaaggtggcatgggaagcaggaagagcctaggatttgggagttggatgccatggacttgagtcctggccactactatgtgcatatggggaagtcacttttctgagcctcagccgcctcatctttaaaatgtgggccctaatttctgccctgccagcctcacaggatggtcatgagaaactgaatgagaagatgaacatggaagccttttgtctggcattaaccacatgtgcctgtgtgctgggttctgtctgcattgtgctaatgatggtggtgatggtattaatagtaataatagtgaacatttaaggaacactgcctcctataatagtcaccatggtaaactttacatacattatcttaatgaatgcagaaaacaagcagatgagcagggaccgtctattattttcccatttatttttgtttatttttaattttttttttgtagagacagggtctcatgttgtggcccaggtcttgagctcctgggctcaagcaatcctcccacctcggttccccaaagtgccaggatcacaggtgtgagttacctcacctggctgtattttcccatttttacaagtggaaacagggggttcaaaaaagtttatgtaatttgcttaaggttgtagagatgttacatagtggagtccagatttgatcccaagtaggtgaccctactgtggtatcactgctatcagattggaaacagcagaagtctaggacctttttggtttggttgatgacatctgtgcacatcattctggtaggtaggggccatctgggggcaggaagttgggtgtgggtaggggttggccctggagaggcaatagaagctggggcttggctggataacaagcctggcacactgagtttgtctctgaggtttagtttctcacctgtaagatgatgatataataatgtgcctcatgggattaaagaaaataagagatgcctagatacttatacattgctataaaaatgtctgtgttataagagtgacatggcattccacaaaatgcagtgtagatgtaaattagttggaatggtgacctcacccctgctaggtagcactggcttatgtcccacctgagagtagtagcatctgagggctagccacactgaacaagccacacacctgacctcagcatcctcttctgtgaggggaatgctctctgctcttctacctgcatgcaccgtgtttgtggaagtgctctgtgtaggacagggaaagcaccttgcagagagcaagggcccactggctgcagagagcctggtgggtgatggaccagagataagggtgagggacagtttagagtgtcacagtttctcatagagctttgggcagtgacaccagtattagtctcaggaccatcattgactcctggttagtttttctgttttcaaaacactttatcagctgtaaagcacttaaaaatgtaaattagttcctgcaaaaacaaaatgcacaaaaaatgatggctctgccaggctgggttgggagatgaatgtgtatgcatgtgtgaatggattcatttctgatgataaaaatactttatgcttatttatgtgaaacttggaaaatagaggaaaagtataaaattgaaactaaaagtcatccataatccttctaagtagctttatcatttaatgttttagtatatttccttcctgtttttttttttttccttaattctgggtgtatgcaaaggattttgtaaccctttacattctggaaactgttcaacatgacttcttttttttttctttcaaccaatttgtggagagtccattttgcaaagccttagcacagtgccaagcacaagctacacacccgggatgctgctgaatgcagatgagagcatgccagctctgctgaagttgggggctgggggcagtggatggctgtgagtggtgtgaagccccgggccacagtgaagaccctggaatggctgagagactgggattccaggagaccgaggtttgaggggaggcttttcattgtttgattagctctttttttcttaccacatgtaagtcatcataatacttaaaaaattgctgtaaaaagcagctaattaaaaatataaatacagtctttttggagactagaaacagtcacaagagaagcagtttcagtgagaaccagatcctttgtcagtgtcagcgagggggaggggcgtcggggcccagccagcaaatccttccctccgaactgggggtgcggaatgtggcactccctttagttagacttgatgagctttggatttgagtaagtgacagccccttttatttcctgctttgttctctcccaggtaccagttgaccacagttttcattcatgcaaatggaagctgacagctgcccagggagggttagatacctgggaggatagagcagaggccctccttctccccgacccctcgcctctgcaggctggtggggaggggggcaggggagtcgagttaccctctctccacgctttcttcttgtgtatgtgtgcgtgtacgtgcgtgtgtgtgttgtgtgtgtgtgtcttgggggatggagaacccctctcaggagggcctgtggaaaggctggggtaagtggagtgagcccgtgggtcctgcccttccaggctgccaagagtttaagttgctgcctcccggtctctgtgcccttttcctgcctgtggaaggccctctctctgtttaggaacgtggatgtggcaggggctgggcgggcacttggcctttataacaacagaagaggattttcagtgacgaggaagcatcccgcccttctggttccctgtcttccacctggccccactgcgacagcctctccaggcctctgacttcactagaatctgcccctccaccccaccttcccccgaaccccacctcctttctctgagcctgagaggagttaattgtgttagagtgcactgagaaacctccaggaaggggccctagtccctgtgttgcctgttcagcaatcacatttgctcacgtctagaaagtacaatataatgactcaggttaaggggtgaaaaaatgtggtggacattttgccagggtactgtgttaactgttccaaggtatcaccctgtgtgagactcaggaacattcagtgttttggtttcccccctattgtactgaatgccggcagctttccccttctaattatttatcttaataatttgaggaaagttgatttgctttttaaaaactggcatccaagcgtaccctatcgcactgcacacagctgagagattaaggcagttctttagaattcctagtccgtgttgtgtacacagcgataggctggggtagtggttctgggtgcaactggggacaggcgaggaaccataaatttggcaggaaagatttgtgttggtaccctgttatatttgctttgcatcacatattgtttaaaaagagcgatattttcgttaaaggaaaaggaactgtgtatttgagataagaagtagaataaaatgaaatgaatagttgggtttcgtcctgtggccttcaaaatggcgttatttctgagatccctgtttctatgctgttccagtatttatacggaacttataaaatacaaagtataggcatgtcccgagatcctggcgaggctgtaatttatagtgttgttctttttcttttgttttacagagctgagtttggtgaaacttcaggaggttttagctagtggcgatccaaagacattaaatattgctttgtgggtacgtctccaccttgcgtcttacttggtgactgttcagtggtaggcaaatgtcagaacccagtatgcaaatgtggaagtggacagatttgagtcagttatctcagctggtgttatgaaatacggaaatttttggcgttggtggtggagggcgttggcataggaggcgtgaatgctctttgtttcttgctgttatgggagtatctcttgattgccccatcatcttgtttggtgtggccccgtttccttctagaagttgagttccctgggcttgtgagaacccttgtacatctgcctccattaaactcacatttggagatctcgtaaatgaacgcagtgcagtccgggggcagagtgaaggctcagactgcagccggacatggctcagttaccctaggtgggttagcagctgagcaggtactggtctcaaaaccctctgaagcgaagctgcctgtcgattccacagttgccagcttccagcatggagcttctggaagtatcacggactgagttgggtcccaatgctggatgtccctactcttcctcctgcccctcccacgtttggatgggcaaatgcactaagaacagcccgtgggcaagtgaatgaaaccaaaaagcagcaagggatttggacagtccacctcagagtatctgactttattttgaggggcatgtgtcagagttgggtgaagaaagagattctcagatggagatagagaaagatccccaaaagggcaggctggctaccagtgatttatttttatttttcttacttttttaagagaatgcagggcattttactcttctgtggtaggagagtagactggccacagcccagcccagaacccttaacaaaaggttaagctgctgggcatggtggctcacgcctgtaatctcagcactttgggaggcagagatgggtggatcacctgaggtcaggagtttgagaccagcctgtccaacatggtgaaaccctgtctctactaaaaatacaaaaattagccgggcgtgttggcatgtgcctgtaatcccagctactggggaggctgaggcaggagaatcgcttgaacccaggaggcggaggttgcagtgagccaagatcacgccattgcactccagcctgggcggcaagagcaagactccgtccctaaaataaataaataaataaataaataaataaataaataaataaataaaataaaataaaataaataaaaaaagaggttaaggtttatacgcaggccatttctaatagatgttatggaagccccaggttttggggcatcagggttggaaaggaagccaaaaatgggtgtgtccaaaggacagatgcattgagaatgggttgtaaaatttcagccattgtgtagattaaccagcacggcaccctgcccctcagccattgtgtagattaaggagcactgcaccctgcccctcctcccccaagcatgcagcacctgagaaagaaatctgacaaagatgctttaatatgagtctagcgctttgagcctttcattgtcatctccagtgcaattgtctgtgggttttgttttgttttgttttgttttttcatttttattggactttgctttgccttttaagggaaactctggatgatatacttcattatttcacttgtcagatggttagtaatatggtattgccattcctgacctaaggcagcaagtgattccttctggcaaactctttaagaaacatgggcatggagcctggctgcctgagttcaaacccctgctctgctgcttaccagttgggtgaccttggtcaagttacttaatctccgtgcctcaatttcctactctgtaaaatggagataataatagaacctgtgtcattacattattgtgggaattaaatgtgttagtctacgaagaggggtgcctcaggcccatggtaaattttatgtaagtgttggttgtatataagatgatgaagtccgggcgcggtggctcatgcctgtaaatcctagcactttgggaggccgaggcaggcagatcacctgaggtcaggagttcgagaccagcctggccaacatggagaaaccccgtctctactaaaaatacaaaattagccaggcctggtggtgcatgcctgtaatcccagttactcaggaggctgaggcaggagaatcgcttgaacctgggaggcagaggttgcagcgagccgagatcgtgccattgcattccagcctgagtaacacgagcaaaactccatctcaagaaaaaaaaaaaaaattaagatgatgaagatgcagcgtggggccatgagaagagtcctggtctggtgagtttggaaacctggcttctggcctgtttctaacactgtatgtccttgggccagaccctttcccctggggtgctgatttcacacctgtaaaatgaagaagtttgacttgcacagtgcttttcttagactgtggtaaggggtggatgtgggggtagtgccaagaccaagtgaaagaggcttctggacctccatccttgcttcagccagagcagcgtgggttcatttcatttttggattttggtttgtgggaagaaagggttctcttgccggtgtgtgtgtttctgataaacaaagaagtgtggaagtggctgaatgagatgacccaaggactctttctgggaagatgcaggaggaagtaggtgagctgaggggaagctggtggggataggcctggtggggcctggggagaaggatttgaaggctcaagtcacacggtgcaggatgggactcaatatagggtgggatagggcggtgggtaaaagccgttacaattttgtccaaatggtatgggctgatttacttattagggaggtacaaatggcttcgtgttataaagtgtcaagatccttatttggataaggcaaccagagtgtagacgagagagtaagagtaagaaaacaaggagaaaaatgagtgtcttaaggatgtagaaatttagtttgctggaagtctctgcagcctgaacaaaacagctgttaggtttgccagaacttaaaccagagggtgcctgccagtggttcatattcttgctacctcttcctcctcttgtcttgtttttcctttccattctaataatcacgatgagtttccctgacatgcacgccccttcattcatttgtatgatcacttagagatgaggagctgccttgccaggtagaaaaaccattctcaggatgaatctttggctttctgaatcagagttttctttgggttttagaacttcattcttattaaagtgggaatttaccggccgggtgcggtggctcatgcctgtaatcccagcactttgggaggccaaggcaggccaatcgtgaggtcaggagttcgagaccaccctagccaatatggtgaaaccccgtctctactaaaaatacaaaaattagctgggtgtggtggtgcgcgcctgtagtcccagctacttgtgaggctgaggtaggagaatcacttgaacctggaaggcaaagattgcagtgagccgagatcacaccattgtactccagcctaggcgacagagtgagactcggactcaaaaataaataaataaataaataaataaataaataaataaataaattggaatttaatatctcttatcatttcttcaattccagtttttattagatccacaacttttttggtcaaaaccagaattttgattatgtgtgccatcctaggctacctcaccatccaaaaatcctcttggaaaaccccacgcttatcaggaaaaggagatggaagtgaaaaaataaaaatatatataaaaaaaggaaaacctagtgttagcaccccttatccagcaggccccccacctggacccccacctgtattcacattcctcccacacttacagtcagtggcttcattaatctctaaggttccatgttctgctccccaaatagactgtttgctcattgaagacaggcaccacacttacattttttttctttctttctttttgttttgagatggagtctcactctgacgaccaggctggagtgcaatggcgtgatctttgcttatttcaacctccgcctcctgtgttcaaggaattctcctgtctcagcctcccgagtagctgggactacagacgcatgccaccacagccggctaatttttgtatttttactacaggcagggtttcaccatattggtcgggctggtctcgaactcctgacctcaagtgatccacctgccttgcccttccaaagtgctgggattacaggcgtgagccactgtgcctggtcttatatttcttttctatttttctaccctgatcaaccttttcttttctatctctctcactgtttctacgatcaaagtagtggagtcagtttccttgcatctgtcccaagcagccgttgctaatgggaatgagtgtcaggcactgtacatcagccctgttttgaaactctgtgcctgctgcctcattgactagctggagagtgttgaacatttggttgtagaatgtatgtggattgctgagtttcacgcatgagctgtgttgtcatttcattcattctgagtggcatctgcgccagggctacctggagtttttccagctccccaggcctagcaaaggcagggatcctgtctcattcagctgcatttcttgagctgtgcttagaaggcctgccacacagtagggaatcaggaacagtcgcgtttacagagctctcgggtgatagaagggaaagtaaaggtatattaaatttcttctaggcttgctgcctaatcccctaaggggccttctcatttctttcagcagtgccatctggcaggcctgagagtatatgggaataagtggggtgctggatcttgtgggcaggctatgggatctgggaaaggggttagcacctgggcctggagggacctggaatctagggggggcatacatctaagctaaatgtggctgtggcttgcaaactcagaggcctttcgggcagcctggtgaaatgataaatgggcagttgctgtttattctcagtcctagagattaaaaagaggtgcccccattggaaactggaggttacatgttctacccaaagggagcagctgccagtcggcttcttgcgatgtgaaagtacagccccagaaaacccaggttaagtgatgtcccctaatttttaaaagttggcaaccaattcaactataaaatcatgcctgctggcctctgagcagtaggcagggctggtgtatgccggaggccaccaggggacataacacctgccatagggtcagaataggtgggtgttagtcaccatccagatggtcagataccggaattgccacagaaatgaacatgacatgcagagcaggcagagcaggtgccaaaagttggtatcaaggaggcgaaggtcaagttctttgcccaccagaaagccttctgttccttgtctccttcccttcctgcacctccaaggactctccactgctccctacagcttaagtccaaatttccctgtctggcattcaaggtcttccataccttccttacaagtgccctttaggcgctctaaatggcgcgtcagctcctatgtgtggcctcagcttagcagtccagtgttccctccccctgaatccctccagactgcccaggctgcatctgcctcagacagccgggtgttcccaagacatgctgcactttcttccctctctgatttgctcatgctgctcctcttcctggaatgctcatccccccaattatggaaatcccactccccactcatccttcaaaaggctctggacaaaaggcacattctccctgaagtcggctaccctcccgactctgtaaatttggaataaatcacatctttcagcttctatagcactcaccctgcatctccaccacagcccttatgacatagctgttgagaaaggtctgtcttccttggtagatgatgaggtcattgtggaaggttcgagtcttacttactgtgtccacagcatttggctcagggcaacagtcaacagaggcttagtgacttagacacttgatggtagagtatggaaaactgattctcatgaggaaggtgcttaaggtctttggtaagcctgggaaaggggcagttggctggaacagagggtgtgagaggagcaggtaaagctggatccagctctctttcagcccaaggcaatacctaaaaccctatctctgacttggaaaggcagtatcctgctgtcttcctgctgtggccatgagcctcactggggcttgacttgaatgttaggactttttttttttttttgagacggagtttcgctcttattgcccaggctggagtgcaatggtgcgatcttggctcaccgcaacctctgcctcccaagtagctgggattacaggcgcccgccaccatgcccagctaatttttgtatttttagtagacatagggtttcactgtgttagccaggatggtctccatctcctgaccttgtgatccgcctgccttagcctcccaaagtgctgggattacaggtgtgagccaccgtgcctggccatgagtaggttctttagtggtgatttgtgagattttggtgcacccatcacctgagcagtatacactgaacccaatttgtggccttttatccctcacctgcttcccaccctttccctctgagtccccgaagtccactgtgtcattcttaatgcctttgcatgagagggaaggctttttaaagggcccttttcaaggtttgaaataaggctccatgacaatggcctgatttggatgggtcttggaatacccttttttttttttttttttttttttttgagacggcgtctcgctttgttgcccaggctggattgcagtggcgcgatctcagctcactgcaagctctgcctcccaggttcacgccattctcctgcctcagcctccagggtagctgggactgcaagcacctgccaccgcgcccagctaatttttttttgtatttttaatagagatggggtttcaccgtgttagccaggatggtcttgatctcctgaccttgtcatccgcatgcctcggcctcccaaagtgctgggattacaggcatgagccaccgcgcccggcccggaatacccttaaaatatagccagaaagggctgaggatgggtaagaacccaggatatagagtcttcccataaaagggagggccatcatgcaagatgaacaacttggtcctgatatggatggggctagaatctccgtattgttgctaataaggtggaactgaatcccctccctgttccccaacacaataaaacttcagtgtcgtctgggtgcagtgactcacgcctgtaatcccagcactttgggaggctgaggcaggtggatcacctgaggtcaggagttcgagaccagcccggccagtgtgatgaaaccctgtctctactaaaaatacaaaaaattagctgggcatggtggcacatgcctgtagttccagctgctcaggaggctgaggcgggagaattgtttgaacctggcaggtggaggtgcagtgagcagagatcatgccactgcactctggcctgggcaacagagtgagactctgtctccaaaaaaaaaaaaaaaaaaaaaaaaaaaaaaatcttcagtgcagggcctgtctgctctccagggaaggctgcagtattgtcaggtttgtttctttttccccacaaaactgcttcggagagctcttaggtcccaagtttgcctgcatccagggtccagatgcttccagggtccagatgcttccagggtccaggcagtgagtggaagtgaaggaggctcctctagtgaaagaaaaaggcatccagtgttaatagtatttcttcccagttgcatggggcttgcatattagagataaaggaaacatcttagctactactgagccataagtggtctcacctttcttgaaacataaggccgtcttggtttgttgttctgttttgtgcttttcacagaggcatggacactgaaagacgtttctctgacagtggagatataggactgaagagtgacatggcttgcagagcactacctgtccccctaatccacactgtcctctctcctcatgggcagcctgagaatgtggacccaaggtagcccatcatgcagttcttcatgaaatctggaaatcttggcatttcatgggaaatctcatcactgctaaagtaggcttagatttgttttaaaaccttgtgtgggctgggtgcagggcattttactcttctgtggtaggagagtagactggccacagcccagcccagaatccttaacaaaaggttaagctgctgggcgtggtggctcacacctgtaatcccagcactttgggaggctgaggtgggtggctcacctgaggtcaggagtttgagaccagcctggccaacgtggtgaaaccccgtctctactaaaaatacaaaaattagccaggtgtggtggcgggcacccataatcccagctacttaggaggctgaggcaggagaattgcttgaacccaggaggcagaggttgcagtaagcagagattgtgccactgcactccagcctgggcaacaagagtgaaactccgtctcaaaagcaaacaaacaaacaaaaaaccttgtgtgggtgaatcaaacacgtctgcaagcctgattcagcctgtagcccaccagtttgcagcctttgtttagatccgtagtggagaaagaggttaaagctacaagttaggacccctgaaaatgaaagatggtttggaagtgaatctgaagtaaattgtcactgtatggtttcagaccgttttctggtagtatgtgctgtgtgacacaggttgtccctgtgttgtgcagtggttttgagcacaacattggccctaggcctgcagtgtggggtgcaggccctctgctgagggctgcagatgctgccgggagtgcagtggatgaggtcctgcccgcacagcctcattcggcgttgatacccatgcctggaggatgtgggctcatcttcttgggtcaggtgagcctcttacacctgtgttcattgcttagctcttttgatgtcattgcatattggttcaattacttttcccttttcagagccatgaataataactatgattttgctagagggaaaaaatgaaatgatcaaggtaatgcatttacatgttacataaaattcatatcatacagaaaggcagaaggaaaacagggagaattacttgttcccttttctctcttcccctcccaattcctttaacaggaagaatgtctcactagtcatgtgatctacagcaaatcctttaacctcttcaaacccgcatctcttatatgttacaggacagtaataaaacttaactcatattattgttattttttatttaatgtggattaagttagttggtatgaaattctccaaatcctatgcatatataaagggtgctcatagagcttttttcttcttttttgtatatccaggatttctttagcggtcttttgtaattatagtaaaagcactgaggttagatttatgggttttttttgaggaggatagactgaatccctttcccgcctcaaggctatagtgggtcggcacagtttgtgtttgctaaacatatctttagctgcgtaagagaaagaaggaaaatagtaaagatgaacagtactgttttctacttgaagttctagttggcccccactcccttccatgtaggaaccttagcttgctttccacaccctcccaccactggactcacaaaggcccctgatgagtgcctccggtaagacagggggaaatttttatcttaattagaaaaaggcttagtatcttgattgtatgttctctggagccagtgatagagatagtataagaaattctggacattcaaatgtaaaacagattaatttgtaggaatgttggatttttatctggacagatgttttgtcttttatggagttggttgggattaagaagtgggggcagggtcatgttggtattttatttttgctttgggcttatgttacttaggattaactttagctgtgtataacaacagcaacaaatcagatttatagtcagttaacggaggcttaagtgatgtaaagttttatttctctctcacatagaaattagttagaggtagtagtttagggctcttagaggccccaggctgtcatattctacctgcttacacatggctttcaggatctaggtcacctcacagtccatgatggctgctggggctccatcccccttgtctgagtcatatgttggcagaaggaggaaaggcacagatcaagaggaggcctttcagctgggcgcggtgggtcacctgaggtcaggagttcgagaccagcctggccagcatggcgaaacaccatctctactagaaatacaaaatttagccgggcatggtggtgtgtgcctgtaatcccagctactaggggagctgaggcaggaggatcgcttgaacctgggaggtggaggttgcagtgagccgagattgtgccactgcactgcagcctgggcaacagagcgagactctgtctcaaaaataaataaataaataaataaaataataaagaggaggcctttcctgctgcatcagctctctctgagcagcgttcctgggaagttccatggaacacttctgcttatctcattggtcataactcagtcagatgcacacactgagctgcaagggaggctgagaagtatagtctcttagtcccagatacaatatgtataaaattcagaacaagggtccttttactaaggaggaggaagagactggatgttatggatatgggcagcaagcagtgttttcaaagtactgaaacagattgtagaactttgtaaactggctgcctttctactcctctgctcacctctaaccaaagagccacctaattgttctgcatggtgaccattgcctgttagattcttggtgaatagattcctagcctcatcttttgttatttttatttttttaataaatggtagaatgaggatgcaggaaacttggaaaagcagagtcaaagttcaactagcacaggagcagaaggtaaattctgttggcttatagaatgagcccagaccctggtgtcagaagacctgggtcagttctggtctgtcctctcctgggactcagtaaagtctcttggctctctgagctttccacatcagtaagatggggaatgacaacccttatgggactgcagtgaggcttagccaagttggtgctgtggaaggccctactggattccaaagcatgatacagatgatgaatactttatgtggctgaggtgcttccagcaggcacgtgggaagcatccatgtaagattggggtcatgcaaaatggggtgggatcacatcgcgggatgaagcacttggatgcaaaggcctgtgtggtccagcctgagtctggctcaacacacagggtcggatcctggctgcgctccttactgctgtatgtacagatttggctcagagggaatgcaggattggcaacatgcatctagtctttcttgtggtctcctggtgcctctcatggtgtgcttattcttattctgctacggagagtgtgacttaagcatgtaatttgcatatagcgtggctcctgaatgcaagccactaacccattattttacttagtaagttccagtgttggggcttgggggatggtgtgtcctttgccagtgaatgcttatgttggtacatttcaagggttattttgcttatgcaccctccccacccccgtcaacgttagagcttagcatcatatgaaaggcagtgtccctgtgactgtatcatagggttgatgaggatgaaatgaagtaactgcaggcagtgtccagcccagtgcccagtgctctgtccaggctcagtgagtgacctttgctgctgctgctgctactgcgtccagctggctacatggggctggtggcagagggtgactcagttctcagtgtgtcttttcctgccccctgccaggttgcttcccctagcctagttccctttttttgtgaaatgctcatccctcagctctggacttcaatgtactgttggtttcaaaaccttatgaaacacaacatcaatgggggaagggagaagagagaagctgagaagcctaacccaactctgacagctgagcggctacagaggacttctcagttgggcttcaatacttcttaagaactttcaagttaggcctcagatgtgattttgtttgctgactttctctttgctaccttggcttctatttagttaacaaatctaggccgggtgcggtggctcacgcctataatcccagcactttgggaggtggaggcagaggtgggtggatcgcctgaggtcaggagttcaagaccagcctgaccaacaaggagaaaccccatctctactaaaaatacagaattagtcgggcgtggtggcacatgcctgtaatcccagctactcgggaggctgaagcaggagaattgcttgaatctgggaggcggaggttgcagtgagccaagatcatgccattgcactccatcctgggcaacaagagcaaaactccatctcaaaaaacaaaacaaaaacaacaaaaaaccccaaatctaattcattcattcagcgtgcacaatttattcaacacagtttgttccaaacactggggatatgccccaaacagaccaagttccctgtttcatggagcttacgtttggtggaagagagacaaatatagaaacaaaagtgtaggctgggtgcagtggctcacgcctgtaatcttagcactttgggaagccgaggtggggagatcacttgagcccagaagttcaagatcggcttgggcaacatagtgagactccgtctctattaaaaaaaaaaaaacaagtctaacatcaggtagacttcagggctgtgaaagaagtgacatagggtaagggaatacagcgtgttgaggggatgggtgctattttccaaggaaagcccctcctggtggggggccataggaaacagctggtgcaaaggcctggaagactcactggcatctttctggaatagcaaggatcagcttggtgggaagtggaatgagctgggggtggagtggggtggggtggattttggagtctgagcttgagatacctgcttggagatgctgagcagtctgcaggaaccaggagcccggagctgagggaggacatgaaggctggaattgtaagtttgagagaaatcagctttttgaagctgtgggacggggtaagatcaccgtcatgtgagaggatgggactggccaggtggtgcatgtgtccaggctcagcggatgttcctgggatacaagtacctgttcatcttgttgacatctaatctgtatctgcgcatagtgaccaaggataagccactgagctgctccaaacgtgtgctatgggatggattaactgtgtgggtgtggaaatccctcagaatgatgagacagggagcagtggagaggaagacagtcgatcattgatcggtgagcctgtacttgagatctggcctggatagttgtgatggtaggtggtacccacaatgatggcccttcaggggatttgaagattgtgaaggaggaccaagaggagctgtttggaccacctgtgatccaaggcgggaactaggaagacacctaccggaagtctttgtggatcttttgggattggattggattagcagatacagagcgtttgacctatagtaaccagctgactgttcagcaaacgcttcacttcctaaaaggcttcttctttccaaggcaaactggggcatgtgaggaacaggaacttacaagagcttctagtctgaactccaggtgctgacactgttaacagttgctgagtggagtccttctcacttgggtggaaagtaacctgtaaacttggcccaagtctcccttttcctgtcctttggcccatgctgttctggtgctagatgttggctctggcctttgcactgaccatctcctcgagatggcacgtggggaggatgtgctgtgttgagaagaacttggctggataggcaaagacttgagctagaaaaagaacaagtggttattcatttggtgcttccctttaaccagggcctttttttttcttttattttaaaggaaacctttaagaaaggagggctctcaggcctttcttagaatttaggtctcagttttacatcatgggattctgtttttcttgggtttccattagaagattaaataacatagtggctatgaaagcatactatagatactaggaactgttgctttgattgtgttaaaggatacctctattccccaggtcctttattgattcatcttatttttatttgtataataaatcattagaatagtgcctggtgctctattgcactcacttgcatatactgtataaagctttgtacatattacttgtttagtcctcacagcagccctaggaggtaggtactattattttgctcattttgcaggcaagaaaacaggcacagacagttaaataaggtcacccaactaacaagcagtagagctaggatttgaactgggggagcctggctccatgttctaggttcttcaccattatactccaaggcctgtcggttttcccatcaatctctactgaagaacaatggcgatggccatactggtaattgttgtgctttatatgctgtgcactgtgttgtgtatttcagatgcacgaatgagaatcttcatccccgcaagatattaagagcccgttttacagaggaggaaatgaaggctcagagaattgagtaacttgcttgaagtccaaagctgaggagtggagccagaattcaaactcgagtttgtctggcttccgaatcctgctatttcctcagcacagtggccgtcctccaaggctgtcacatgttccttccctggtgattcacggcacctggctacctccttttagactcactttgtggcccatggcacccagttgtgtcatgacaggacagtggctcccatttctccgggcctgactgtgaggccacatgagccaccccagggaggccagcagagtcagagcttggctttgaaagctgttaatcgacctgagcccctccatgtcccttgctccattttaagcctagggctttcctaaagcaccgcagatctccttttcttgtgagaagagattaggcagatgtatacatacacggtaatgtgcaagtgtctagtttcttgtcagcatcgggatgagctgtttgtagtgaagagcctgggcctggtgagcccccgggatgatgggtggggaccatctgtgctctcctggaaaggaaattgtggtttctttcttttcttttttctttcttcttctttttttttttttttttttttttttttagtttatgggaaagggagacttgtgtctcaattgagtctttgtggcgttgtattacagagagtcacagaaaatgttctatgtaaatgactatgtgctctgattagagcctcaatgggcaccattgtgtcatattgctattattggcgattgcaggatactaaatgatattctcatcaggctgaaaaacttcagtgttagcagtgaaactcggggttaattatactgctctgaattagagcatggaattaagttgtagggagagtaagcctattgctttcttccccctctgtcttcctcttcaagattcttgctgggggtttgatcagaatagtttttaacccatgttctatatctgtactactggcattttgttctccatgagttactaccccatttggggttgggaaacacaggaccaatttataggacagtgggagaaggggagacatggtctacttaatagtgcattcttctcagtcaatagctgggtaaaaaatagcatgaagattgaagtcttaggggaatgctggactctctagaggggcctctttaatttagctcttgtctcttctgcctttgaattctcatctcttctgatcctgactcacctctttgaagaaatgacacactgacctacatcttggctgaaacagatagaagagtctatctctgttctgccccttcttggcattcccagcacagcctccaagggagtctgtcccagagctgaggcaggccctctcgggttgcatgccattgacttctcagctttgttttaactgcagagtttccagtgctctgctcttcttgaattgctcctgattgtcaccttcttgcattcctttctctcatttctttttctgtaaatttcatgtcactggtatcaggtttaaagtcgtattttttaaatccctttcaatgttacgtgggttgtaaatgtaattgttaatattatttaaaaatttttgaaaagtgatttttagtggtggccttatcatatctacatattattactccaccattttgggatgtttaggtcgaatcctggttttttcttcttttgctgttgtaagtcatgtatattggcaattagcctaggagagattcctagaaatgagttcactgagaatatgagcttaagagaaagtgaggatttaaagccagatctgtctgccttcaaatccagcgctctttatactgatgtgagttctcctgtcttttttacctatcagaattctagaactctcccagagaaaccaggcagatactgctccacaccggtgagctgcttctcacctgggtagtctagggtggtttgctccagaattgtatttctgctttttctttttttaacttggcagtggttaaccattccctggagcagcaccaggtaagtcagcttgtatcagagtcatctgctttacctgacatgagcacacgttgtcatatatttgcacatgcagatatcatatgttaaacaatatcacattgttgaagaaaattacactggaaagcgtaaaatatagtttggatgccatattgagtgtaacttaatccacccgattcagaacttttgtagagtgcctcggagttcctatttggaaatatcagttagcagttttagtcagtagagtaacatattttctatatttatgatatatcaaagagactttctgaagcagaaccctgattgactcaagagtcttttccaaattctgtattctctcagaaccaggatttaataggaggtgggtggggggtggtccttggtcaaactggggaaaagcctcataatgagattgccaaagcgcttacagcatttgaaggctcagagagatgccgtggtcaggaagcttgtttgagtctgtctggaagccagtaagtcccacagaatacctactgataatcctgtggaataagcagcatatggaatgttgctgagctagaattaaagtccacacacggccaggcgcggtggctcacgcttgtaatcccagcattttgggaggccgaggtgggcggatcacttgagtccaggagttcgagaccagcctggccaacatggtgaaacctcatctctaataaaaatacataaaattaggtgggcgtggtgatgggcatctgtaatcccagctactcaggaggctgaggcaggagaatcgcttgaacccaggaggcagaggttgcagtgagccaggattgtgccattgcactccagcctgggcaacaagagcaaaactctgcctcaaaaaaaaagaaaaaaatatattccacacacctagtttttcagccctatacaggctgaccccatacctgccatctccttttcacttcctgttctttctggcctccgtgagtccacgtgtgcccttgtctctgcttgctgtgcctttctctttcctccacgttgctaaattccgtccatttttcaaggctcagttcagatcatccttctttgctttatcattttacatactgtgtatggtttggcctcttggtctgctgctctctgtgtctgttgtatggagcgcttttctatctggtattacggttatttgtgtgcatgtcttttgattcatctacttgaagacaagagctggtcttgggctgccattcctgcagtgtaggctctcacattgccttgcacgtagtaagtgctcagtaaatgcttggtgaacaagtgttcatggcgtaacttaatacttccagtggtgagagttcctgtcaagagtgttggcagtgaagttgttccccttggcaatttctatgctgatctcgggttactgcatgagacacagaatctgcgtttccctcccttcagcatcactggggaggacagccttactttggagttttttttctgatcagttacatgatggtttcatctttaagactactgataacaggcagctctgcctatggagtagccattcttttttttttgagatggagtctcgctctgtcacccaggctggagtgcagtggcatgatctcagctcactgcaacctccgcctcccggattcaagtgaatcttctgcctcagcttcctgagtagctgggtctacaggcgcacgccaccatgcctggctaatttttgtatttttagtagagacggggtttcaccatattagccaggctgttcttgaactcctgacctcgtgatccacccaccttggcctcccaaagtgctgggattacagacataagccatggtgcccggtggagtagccattctttatccctttactttcctaataaacttgctatcactttactctaaaaaaaaaaaaaaaaagactgaccaggtgtggtgactcatgcctgtaatcccagcactttgggaggctgaggcaagtggatcacttgaggtcaggagttcgagaccagcctggccaacatggtgaaacccccgtctctactaaaaatacaaaaattagctgggtgtggtggcgggtgcctgtagtcccagctacttgggaggctgaggcaggagaatcacctgaacctgggaggcagaggttgcagtgagctgagatcataccactgcactccagcctgggtgacagagcgagagtctgtctcaaaaaaaaaaaaaaaagaaaaagactattggtaacaaccctcatttttttgagcacttgctatgctgctaactgctttatgcacactatttctttaatccttaacactatttctttaatccttatatctacccatgagatagggttttgttattcaggcagtggcaaaacctgcggcttagagaggttaaaaaaaaaaaacaacaaactgcctcaaacaaagtcatatagtaaatggcagtgctggagattaaatttaggtctgtcttgttctgcagtccatataccatataactttgccaaatacaacactatggtgtgtgtgtgtgtgtgtgtgtgtgtgtgtgtgtgtgtatgcacatgtgtggcctttattgaacactgtggtgtgtgtgtatgcacgtgtgtggcctttattgacttattgaattgatcctgaatcttccctactcctttcctgtctcttttctctttctgaataacatcatttctttttctctactggacatggtctctgtgggtttcacccctcacccctcttatttttgaagttttattgaggcactggttgaggctttagggctcccactgttaagtttgacagtaataggtaagtgtccccccagtctcccttttgccctttctttttttttttttgagacagagttttgctattgtcatccaggctggggtgcagtagtgtgatcttggctcactgcagcctccgcttcccgggttcaagcgattcttctgcctcagcctccccattagctgggaatacaggcgcacaccaccatgcccagctaatttttgcatttttattagagacgtggtttcaccatgttgggcaggctggtcttgaactcctgacctcaagtgatctgcccgctgcagcttcccagagtgctgggataacaggcgtgagccacaccgcctggccgcttttgccttttcttgacattgccaatgcatcctgtccccgagcgtctctgagttttaagtctcagatttgttttctttggagacaaactgcaggtaggtgttacttctcaccgaagttcccagatagcacaggctttgctaaacaacacagcaccaggaactccatcatagagaccgcaggatgctgtgtgcgcgcacatgcgtgtgcacctagtgagatgtaaacatttacctggagtaaaagaaattctttccccagagcccaaatttggctagtctccttatgtacacagctttgacagggattccatatgttttgctcatctttgcttttttgcagcctccacaaatttattttccgtaccactgccactaaacagagttgtttctaaagtgcagatctggttgtgccattccaccgtcaaaaattattttttggctccttgttgccttcagggtgataggacaggtgactgctcacctctccagcttctcttactttctttcttcttcttcttcttcttttttttttttttttgagacggagtctttccaggctggagtgcgatggtgcagtctcggcttactgcaacctccgcctcctgggttcaagcaattctgctgcctcagcctcctaagtagctgggattacaggcacctgtcaccatgcccggctaatttttgtaattttagtagagatggaatttcaccatattggccaggccggtctcaaactcttgacctcaagtgatctgcccgcctcggcctcccaaaatgttgagattacaggcgtgagccaccatgcccctcttacattcttttcttctgttcactacagccgtggagagctccgggttgtcctgcacatgtgcactgccctctcttttatggaccttttaggctggctgcaccctccgtctgtgtcaccctcctgctcctcctccacctggctagttcctgttggccacttttggaaattcatgccagtccagtccaccctgagtacatcctctttctgtgtcactgagctcactatgctgggttttatctatgtctccctcgcaactagatcattcacgtcttgaagttaggcatcatgcgttcttcatttctgtacctcccaactcaatgcttagcacccagcaggggctcaagactgtgtgtggaatgaaggattcgtgtgaaaatgcagggagatggaaggctgagcgtttctgttccttgaccattcccgggtttgactaataactctcatacacactgctactcattgaaggcctactgtgtgcatgcattccatgtgtgctatacagtttatttattgttaacccacgtagaattcccagacacatagcgttactacaaacttcatcacaaaaataaagaaaccagggccctgtttctctttgtttctcagatgagaagtctcaccagagttgactgtggcttctgagcattatgaggcacatgtaggatttaaagctgaaaggctttatccctgagactcagggaaatatgacaatcttttattttgttttaattaatattttttgagtcagcgtcttgctttgtcacccaggctggagtgcagtggtgcaatcatggctcgctgcagcctcaacctcctgggttctagcgatcctcccaccttagcctcctgagtagatgggaccacaggcacgtgccaccatgcctggctaatttttgtactttttgtagagatggggttttgctgtggtctcaaattcctgagctcaagcaattggcctgactcagcctcccaaagtgttgggattacaggtatgagctaccgcacccagcctgacaattttttaaacagaattttaggtgcttgggccctggaaggttcccagttgtccaactcttgaggtggggggtgggtggggggtggagagagagagagagaggaaggcttttccttctcaaatagtttgcatttacacgaaggccacggtgtacttgtttattgaatcaataaagatacaatctctttgaatagttcagaatctgatatccctgttagactgagttcaccttttgtgaaggacacaggactgctggatagggtgttgcagcaatgaggagttatgttataaggggtctcttcagtgtctttttggtcatatgaattttatttgcccagtagaacatgactgatgaggctctgaatagtcaaagaaaacatctctcttatgttctgctcatgaatagaacactctgtgtcctgaattgttgctccactggggccagcacgtggtgtatttttctaatgtttgaaccaatgggctttttcattttggggcaatcaaggtaaagattttctggtgctcctgtgtgacagggaaagcatgtcttgtattttctctctctttcccttctgtcttttgagtttggaaaattatattttgagttacatgactaattacatgagtaattttagcaaatttactagaaattgatgttctgccaatgattggaaatcccttcctcccctccactcttctaaaccaaaacagtgctgtgtcctgaagctagaggggtgagtattcagtattggagtacagcggtttagaacattggagacatttacaaggataaatctatggccctgggttctgactttcttttgcctgtgtgtgtgtgtaggggtgtgtgtgtgtgtgtgtgtgtgtgtgagagagagagagagagaaagagagtaagagagagcgagctgggtttggggctgggaaggaagaatgattgattaggaagctgttgtgcagagtagaacaggacttcctgaaatgtaagacccaaagaaacatagatagccatattttccagtcctggaatcagactcaagtctgataaaaggttttcttttgatttgtgattctgataatatgaaaagtcttacaaaagtatagaattgtagctggtaggctgctttatgagaaagaaaataaactcccacagagtgggcattgacctgggagatctggagcctggtgcaagtgcagaccatggttttcacaatctttgatcactttccttttgtgttgaactttctcttttagctccatatttataaatggggtcatatttagccagatattttatttttatttttatttttaaagagaggcaggatcttgctgtgttgcccaggctggagtgcagtgccatgatcatagctcactgcagcttcgaacagggcacaagccatcctcccatttcagcttcctgagtagctgggattacaggcaggagccacatttcctggcttctagttgggtttttttgtttctggaagaacagaaccatactcctcaggccaggaagacctaggtagagcaagaccagcaacctcttggctagagggctgtgggagctgagcatcagtgagtgaggggaaagcagtggttttttgtcttgagaagaagttcagcgctcagttaaccagaacaagtgccacctgtataagacagcagacggtcaaagcagaagagggaaggaaatggttgaataattctttttttccttttgttccttctctgccctgagtctcccccacccccaaagagatatctcaaaatgtcaaggtccagtgaaatggacggtgggatccttgaggaggggtctgtggggtgggggtctctgaaggggctaagccatggtgggctaatggctctgtttaccgagtgcatgccctatgcctggcattgtgcttctttctcgaaaccatcctacaggtggaggaagcgggggtttaaagggagccagcagccagcgactctctatcttacagcttctaattggctttgaaaccacacaggctgctgctggaggaacctttgacatcctcagtgtgcagccctctcccctccctctgaagggaggcatactccttcactgttgctttgacactctaggatgttccaaaactaggtggtcagcttactcagaaggctctgggcatttttcctcctgcaggagggactgcgcacatgcgaaagacatgaggaagctctgatgctcagggctgtgggggctttggccttggcccgcacagccttctctggtatagtgaggtctccttttgggtttttcacttgtgtttgttttgaggcgtatgtgcttcatatggttgaactcattcctcgcccagctggacatagagttgactgcctcagtgggtcccacctcgggggtgggaaatgtaacctcatgagggccactgtatggttgggcagattcacagctgctctgaggtcaggcctggcaggtggcgagggcctaagaggaattggatcaccctggaacctagctggggctaggatggttgttgcatgtgattttcagcaggactctaagggatctccaaagctggttggctggctagcgaggttgggcgagggaataactcatttgcttaacttttcatatgtaacaactgggttttgggtttcacaagagacaaggtaggcaggcaggctcaggtggttctgtataccccatttcatacatgagaaaatggagacttgtttcagatcgtaaggtagttggaccgcagctactcttccaagactggtattcgttcctctactctgttaaagccagagagaggatgcaggccaagtcaagtgaccaaagctaaaggggaaggaagggctggctggacttagcagtgaccacagacagagttgaagccttcacggttggcgttggccttgttcactgctgtgtgccaagctgctgacagcatctggctatcgcaggttcgtaataagtgtttgctgagtgaatgaaagaatattggtgttggggatgatctctttttcacttgctcagcaccttccagaattttgttcttctctttgccactcccttttttctcctccctgggtaacacctcttattgcaggagtaggatcaggttttgagtagcacctttggggtacccattcagttcctcttttcccccgtaattatgggatttgggattgccctttgggagaattaggtaactttaggttctgtatgttaatttgaggcctggattttgaacttccttctgatgcagatagaccttggaagggagtccttacttagaacctctttattttatctcctcactgggagagtagatcccagacaggttttgggaaccacctggtgtccccaagcgagcagaggcagagttgggcttgaatctcctccttcattgcagtgctttctctgccctgatcccattgggtgaccctggactatgaatatggattatgagtgggccctgagagtgatcagagacatccttcaagattgaagctgctttggttcctgccacatggaactgagtgggagaatgtctcaattcaggatggtgggagtgtctctttgtccaagtaataaatggaaaccgtttgctcccgacttttgcagatatcaagggcttgtctttccagagtttggttttcttcccttctctccgcctcccttttctctgcccgcctgtggttttgagcccctcatggctatctgggcagtgatgggtggaagggagctggtgcagtattcgagtagagaagttctgctgcagtgagtgtggggcaagtttcccagacccttgttgggtcagggcaggtggttgtggcccagttgtttggccttctgcaggctgcacccctgccctgctgcctgccagtggggtgagggcctggccacctggtacttaacaagtttggttctacatgtgttcccgtgagtggaggacaaaatgaaaatacctcctgatcgtgttcaaccattagttgaacaaccatttgaaatggttattgcaaccatttcagagttttcttctgtttgtgatgtcatctgtgccttataaggggtgacttgctaccttatggagcacctaggttgaggcccgggttgagcacagttccatacgttagctcatttatttattttgagacaggatctcacttctgtggcccagggtggagtgcagtggtgcaatcacagatcactgtagccttgacttcccaggctcaggtgattctcccacctgagcctcccgagtagctgggactacagctgtgtaccactatgtctggctaattttttgtatttttagtagagatggggttttgccatgttgcccatgctggtcttgaactcccggcctcaagagatcctcttgtctccaaatcgcttcgcagaagtgctgggattacaggtatgagccaccatgcccagccaagttagttcatttaatcttcacagtggtacaatgggctaatatctctgtcttataggtaaggaaatggagactaagagctctttgccaagggttgctgtcatccatttattcatcaacaggtagttattaggtatctactctgtgctgggccctggcctgaacttggctttggtggatgagactgacaagttctctgttctcacagagctgagagtctggggataaagatcccttattatggtttcttttgtggtgttgtggggagagggtgatgattagggtttgggtactggagagagaattaggattttagctcattttactcaaatgctttatattgcaccatgttactacattttcccctgtgcttcccccctaccctatgtggattattacagtttacttgtgtgtaaacttaggctcagagaggctgggtaacttatcccagcttgcacaaaagaggacctgaatttgagcagaccgtaggttgaattctgtccttctatgctgcctttctatgaataatatgtttacatatatatatatatatatatatatttttttttttttttttttttgagatagagtcttgttctgtcacccaggctggagcgcaatggtgtgatctcagctcactgcaacctctgcctcctgggtttaagtgattctcttgcctcagcctcctgagtagctgggattacaggtgcgcaccaccacgcctggctaatttttgtatttttactagagatggggtttcaccatgttggccaggctggtcttgaactcctgacctcaggtgatccacctgcctcggcctcccaaagcactgggattacaggcatgagccacagtgccaggccttacataaaaattgtttaaaaagcagtttgcagaagaattatcaatccttttgttaacattttggtgaactcttgaacacattttttaaaaagttgagagttgctaacaagtaaagtgaagtcctgtgcctgttgtaatttggactgaggagtgtgagttgtcttggtctaaaggtcagagtgagggtctctgcctgctgcaggggtctcccggttagggttagggtgaaaagctttttaaaataaacctctcaaatttgttgtcaacattaacctatggtaattttttttttttttcttttttttgagacagggtcttactctgttgcccaggctggagtgcagtggtgggatctcagctcactgcaacctctgcctcccggttcaagcgatcttcctgcctcagccccccaagtagctgggacgacaggcgcgtgccaccatgcctggctaatttttgcacttttttggtagagacagggttttgccatgtcacccaggctaatctctggtaatttttaaactctgctcaaagttttagaaaacataagtctggaaattccaagttgagccactggtgacttgtgagcatgagtatggcatgggattgggggtggggtggggctgacgtggcctggggcagatgccgggtggttctgtttggaaacagaagttccactgcacatgcagccttcacgtcttgtgggggcttttgtgggggctgtgtacttcccagtttggttattagtaactttatttggttctggtcattaacggcttttgggggcgttttgggggcctgtttgaggcccctgaacatgcatttttcagttgtcgttgtccatgttattaaaaggatatgttggagggggttgcagtttagtctgctgctgtttcgaatccttttctttgatagtgtttgccttcctcccaccaaatgctgcactgagagtctctggtacctgggtccctccttcccttgcctttgcttgggaggtcagtgccttcatccaggacatctttgggcatacaggtaatcccaagcagctctgctcagttgttgataccccttctcacagaacctgatctgcctcagctctccttgcctcctaagtggcagtgccccgctgctgggaagactcctctctctgctggatgcttcttcaggcctgctgctgcacagcttacggccatgatgactgctgcagtgcagaaggcatttcagttggctgtttgtttttcatgcattttgtgtttgtagtgtgctggccacgggagcactctaaacacattatgggccgggcgcagtggctccggcctgtaatctcagcactttgggaggctgaggcgggcagatcacttgagcccaggagttcgacaccagcctggccaacacggcgaaaccccgtctctactaaaaatacaaaaattaaccgggtgtgatggcgcgtgcctgtattcccagctactagggaggctgaggcaggagaatctcctgaacctgggaggcagggactgcagtgagccaagattgtgccactgcactccagcctgggtgacagagcgagactccatctcaagaataaaaataaaaacaaaaataaacataaaaataaacactttatgtacacaatctcacatcactttcacagtcttggaaggcagatatttctgttatcctcattttacagctgacgcctatctaaggcttgtataaaagtcagtcactgtccaggctcacacagccaatgctggagggctgtgtggcacccagagagcacagttgctgcttggaataaaccttcacttatagtccggagcagggtggttctaaagctcccttagctttcccactagtaagcttccaggttctggtacagtttctcagcctcggcactactgacgtttggagtctgatgagtctttgttgtgagcgctgtcctgtgcattgcaggatgttaggagcatacttggcctctatccactagatgccagtagcacccccctcccaactctgcccagttgtgacagccaaaatgtctgcagacattgccagatgtcccctgggggacaaaatcttgcctaattgagaaccaccgagtcatggcaaccatttcaaaccctaagccaggatgtacgtggagatggagaaaggtacaacatttagaattggtactgttggctgggcacggtggctcacacctgtaatcccagcactttgggaggccaagacgggcagatcacctgaggtcaggagttcgagaccagcctggccaatgcggtgaaaccccgtctctactaaaacaaaacaaaacaaaacaaaacaaaacaaaacaaaacaaaacaaaacaagtcgggtgtggtggcgcacttttgtaattccatgtactcgggaggctgaggcaggagaatcgcttgaacctgggaggtggagattgcagtgagccgagatcgcgccattgcactccagcctgggcgacaatagtgaaactctgtctcaaaaaaaaaaaaaaaaaaaagaattggtactatcttagaaaacctggagcaccctgctgctttaactgcagccctctgtgtgggcagacagattgacagtgggcttaatgtggggtaacctttcatcatgaaaattaaattacactgcaggccttttgtagccctcctatatgaaaccctcttaaaatattttctttttgcaatggaagcttgggggaaaaatcatagtcttagatttattgaagttttgtggataaaagcactttttattaaaaagaaccaggtgaaaactagaagggcctcttttgagtctgctgacagacacgtggagaatatatagtcagcggaacattcctgtgctttccgtaaagctgtggatgaacctgcctttcaggtttcgtagcctcttcagtcagatggtttgagaatgcgtgttttgtggtgtatgcacacagactgtatgagtttgtttttttacacatgactagtaaacctgtcacattttgtcaaatgtgattttctttctttattaaaatagattttatttttagagtagttctaggttcacagcaaaattgagcagaaggtgcagagatatcccatatacccctggcccccacatatgcacggcctcccccgttagcaacacccccaccagagtggaacaatcaatgaacgtacattgacatatcactatcacacaaagtccatagtttctgttagaattcatgcatagcattctacattctgtgggtttggacaaggtatgatgacatgtaactgtgatttcctcaattcaatatgtatagttcctgttcacacatttcttcacacatttgttcctcagtgctcaaatgcctgctgtattccaggctgtatttgaagcccctgagcctttatttggagagttcattgaacattagagcatgcagtttgctgagatgtcttgtacttagaaaatccaatttataaaaaacctcaaatagaacagtaaatttagggaattttttttttctgatgataaaattagataactctgttgcatggattctgtaaaacacagctccctcctgttacgccatgaattgggttcaatttacaacacccctttaggcatactttttcagcaacacatgtctgagccgaggtgcactgtgcctctttctgtagcaggcagcttttagggggtgtcctagtggtcttatgttttatacatctcatgggagtggctggtttctaggaaatagctcacttgccagttttggtaaccctaacagagctgttttgccaaggcgtctggtgaatatttctgtcttccagtcaggactaatatagtacttttcagaggtgatagccagttaactgatgactttttttttttttttttttttttttttttgagatggaatctcgctctgccacccaggctggagtgcaatgatgcgatcttggcttactgcaacctctgcctcccggattcaagcgattctcctgccttgcctcctgagtagctgggattacaggtgcgcaccaccacgcctggctaatttttgtatttttggtaaagtcagggttttgccatgctgctcaggctggtgtcgaactcctgggcccaagtgatctgctcacctcggcctgccgaagtgctggcattacaggcgtgagccattgcacctggccgtgttttctgttttttatttagaggaagtcacttgatcatgcttttccccccacccatggcataggaaaatgattcttttgctgattgtgctgattaaatgtgatgtggaaaaacctactcctggtgttcagagaggttttccaggtcacagtggggtgggtctcatctggacatcagaatcattatgttaatgataactaagagcagttgactgcttactataagccagccactgacctcagggcattgcataactggcttcctttactcttcacatcagccctgtgggcttgggagtgagacctctacctagtttttaaacaaattacataaactttttggggctcagctccctcatctgaaaatcagaaaatgatacttctctggcattttgagcatgagttcaggagtcagacttcctgggtttgaattctagcttcttctatgactttgagcaaattactttaactttgctaagcctcaggtttctcgtgttgcataggcagatgatagtcatatctgaatgtaacgagaatcaaatgcaacctgggacacagtgaacacttggtgaacgttagtgccttggtaacagtgatgatagtgacaataaagatcgatgatgatgatgatggcgatggtgcttaacccagtatgaaggtgaagtgtctaagcttcttgagggcagagttttgtcttcttctgcactttctttctagtgtctagaattgcctgtaggtttacccctggatcccgtcaggatggggctaaatttagaatttttggaaagatgtgagctagcccgtctacagtgacatccagctcagtgtgtatgtttggtctgtgaacatagtagaggcatgattcaactgtgagtttgtgctgggagcatagatggatgcttttcaggctcttgaaatgtgcaagtgtggttcccttgcagcaggcattgcctctccctcgttaatcaagatcttttccttgccaggacttcaggagatcctggacatcctctggagcccaggggtggcctcacccgctccttgctttagcctggaatgcaggccctcaacattccagccttgggttagtgccagagctgtgaaagcagggcaggcatttccaccttgcttgacaaaggcttttgctctctgggtggttgggggtgcctctgaagccaggcgagaccagagatctcatgggtttgtgtttcttcattgatacttttaaggggagcaacttaatcagtgggaaaccagatctcaaaggatgggacagataaacgcagggtacagagaagagcttgggggagtgtcaagcttatttgcccaaaagggctgaccctaccttaccgccattaatacatgtccttcatgcatccctgggtaacagggaagtagtaccaaaaatcttacagtgcaataaacacttggcagaaatggagaaactagtaatggctgagcagctgtgccctctccaccacctcactatgcagtacgtgggccaccagccgctaggggcctggcagccacagagatgagggaagcatgctgaggaccctggtgtggagttggaggggtcatgtcctctgaaaggtggccaccactcatcgccagcccttactgtcatgtgagaatgtggctctgtgtttccagatattgtttttttttttcccctccaacagaagcaggaaatataaaaaatttatataatatatataaaatatattatatataaatatataaatatataaaaataaatatatattatatatataaaaatatataaatatatataaaaatatataaatatattatatataatatattaaatatattatatataatatatttatataatatatataatatattatataaatatataaatatataaaaatatataaaatatataaatatataatatatattatatattaatatattatatattatatataaatatataaaaatataatatatataaaatatatataaaaatatatgatatataatatatataaatatatatgtataaaatatatattatatattatatactatatattatatataatatataaaaaatatatataaaatatatatataacttcacggaaactctgaaggagaggtcaaatataatattatatattttatatatataatttatatatatataaaactatatatatatatttttgagagacagtcttgctgtgttgcccaggctggagtgcagtggtgtgatcttggctcattgcaacctctgcctcccaggttcaagcgcttctcctgcctcagcctcccaagcagctgggattacaggtgtgtgccaccatgcctggataatttttgtacttttagtagaggcagggtttcaccatgttggccaggctggtgtcgaactcctgacctcatgatccgcccaccttgacctcccaaagggctgggattacaggcatgagccaccgtgcctggccaggaaattatatttttatgagaaatattctgttgtttaaattctggcacctcgttctttttttttttttttttttgagacgaagtttcactcttgtcgcccagtctggagtgcagtggcatgatctcagctcactgcagcctctgccttctaggttcaagtagttctcctggctcagcctcccgagtagctgggattacaggtgcctgccaccacgcctggctaatttttgtatatttagttgagatgggggtttcaccatgttggccaggctggtcttgaacacctgacctcaggtgatttgcccgccttggcctcccaaagtgctgggattacaggcgtgagccatggcgcccggccctagttcacaaaatatatatggccaaacaaaacatgtctggggctagacttggacagggggccccattgtgcaacctcttatatagcaaattagagtttaccaggaagtttctgcccttcaggccctctgctctcacagaaactctatgaaggagaggtcatcttgtctatgtttgtaagaagtcacattgagagaaatgacatcttagctcctcttatgtgccaagtagtttgtctgcgttatcttcttagattggctccatctctcaggtgaggaaacagacttggaaaggtgaagtgacttgcccacctagttagaagcacatcatcttctgattcctgtctcatttcatttcaccgcttgtttgccctctctgtggtcttgcccacggacttgtagtccctgatgtacgccaggcctctcacagtgtggcccccgggattcccttttatgaaaaaaagttgagcatgagctgtaagttagagtaggttttaattctgtcctaccacggagtctgttttatatgagaacaagttatttaactcctctgagtgttaatttcctcatttttttcctttctttcttttttttttttttaaagggccagtccccattctcacagggtgtttggaaggagtaactgaaggggggtatataaagccgctggcagccaggcatggtggctcacgcctgtaatcccagcactttgggagcctgaggcaggcagattgcttgagtctaggagttcaagaccagcctgggcaaacatggtgaaaccctgtctctataaaacatgcaaaaattagccaggcatagtggtgcatgcttgtaatcccagctacttgggtggctaaggtgagaggattacttgagccagggaggttgagactgcaatgagctgtgattgcgccactgcactccagtttgggtgatgcagtgagatcccatctctaaataaaaaaaaaataaataaagcccctagcatggtgcctggcacatggtaggccctcaaaagatgaccctccaaagtggccaggactcaccatgcattcagggaatatggattcttttggtggcagcaggctgcatttttgcctggctgaatgcctgcaagcatgggaacttttgatgcaacagtaatccttggggtctgaaaggccccaaatctcccgccagatctctgaggttaacatccagtcaaccttttgcttttcattcttggcctctttcctcctcacctccaccagtgtgacagtcatatcctctctatgtttctggtaagttctggccttgagggctggtcttatgactgacaagtgaagagcagtgccaccctctactccacattctcagaagcgtctctaggttccatactttaaggcaggctagcttccaaggcatactgacagacatccctgtgcagtcctgggggcacgagggtcccattccaccctggggcttcagggtcaggtgaggaaggtagatccctgaagttgggtccagaaaaggccactgggctagcctgtctctcgttctggtcactgacctcaggatccagcaggacgctgctagcttgcttggctcagctctgcgagtgctgggagcaataagcagtgctgaaaacgcgatgcatttcaacccaaagcactctgatccctttccaggctttgggagaatgttttttccagctcggttacttgctggcatgcataggtcaatatacaaggtgttctcagagaagccggagctgaatgttgacttttgtgctccctggggtgtgttctggggaggaagtgggttttcaggttgtggtgcgtgtaggatgtggtctgggatgattagtatcacacactgtggataaagttaacacgcattgtggagcttttttcctcttttgtacttttgggcgaaggtgcctcaaaagcagctttgtttatcaaggaggtgcccttgattctgtatgcatttttaacatctgaatagaagttagacgcacacataattgctttacttgatgcagtaaatacgtttcagccagataatccataagaccctagttcagatcctgactttgatccctcttagttgtgtgagctctcaccagtttacttgacctcactctctgagcgtcagattcctgagtgtaaaataggtacaaaaactcagattgttgtaaggtttcagtgagttgttgcgtgtaaagcatttagtatacagttcttgtcacaatgtttagtaatggcagctattatcttaactattagagcggcagtttggcgtggcactaataatgatgatggtgacagtttcactgagtgcttactacctcagctattcttccaagtactttgcatcacttagctcatttaaccctcacaataaagcgataaggtaggtgctgttctaatctctgttttacagatgctaaaactcggcagccaggtgtggtggctcatgcccgtaatcccagcactttgggaggccgaggtaggcggatcatctgaggtcaggagttcgagactagcctggccaaaatggtgaaaccccgtctctactaaaatacaaaagaattagctgggtgtagtggtgcatgcctataatcccagctactcaggagacagaggcaggagaatcgcttgactccgggaggaggaggttgcagtgagccgagattgtgctatagcactccattctgggcgacaagagcgaaactctgtctcaaaacaaaacaaaacaaaactcaggcacagagaggttaagtaacttgcccaaggtaacccagctcataaatatgaaaagagcagggactttagagtcagaagacctgggtggcacgcttgcatgccgtgtcctggtggtgtggcctaccgcagagtgactgactctgattgccttcccaactgtaaaatggtgctaatgatacagaccgccccccattgcctggtgtggtgcgcggctgtgagtgcttaataataggtgcttaggcatcatttgctaattaactgactgtgttaggttattaggaagttccagtgggctaataaaagctctgggtaaacgttagttgttcttttaaatgtcctgaggtgcttatgattggagtttaaacagcacacctgtttttcagatttcggaaccacttaagagaggcacagtgtaaagaaggtggagatgagaatatcacctttactcctgatacagtcttggagaatgcagcttagttgtggggcagcattagctttctgatatgaagctgagattaggtggatgtaccaggccagtcacgggcagccttgggtacccagaggccttctcacgtgggtcgaggcaggtggtggaggtggtggcagcggtagcccccataatacttctaggtggaagaacagaccacctgagtgagagaaatcactcctgagccctgggggagaactgtgtggaggggcagatgggagcctggagttttgagggaaaaaaaactttccttttggaagccagacgtagggaagaagcatattgatcacaatgactattaaagaaagctccccaacaccccagcaaaacacccacaaaacaagaaactacttctgccaatggttctagccagttttcttcaccacagttcatgactgcttcatccttttaggtgatcacacccaaaacttttgggtcttcctgcctttttttttttttcttttgagaccaagtcttgctctgtcacccaggctggagtgcaatggcacgatctcggctcgctgcagcctccgcctcccgggttcaagtgattctcctgcctcagcctcccgagtagctgggattacaggcatgtgccaccatgcctggctaatttttgtatttttagtagagataggctttcaccatgttgaccaggctggtcttcaactactggcctcaagtgacccacctgcctctgactcccaaagtgctaggattacaggcatgagctaccacacccagcctttttttaaaacaaaaccaaaaccaaaagagacagggtctctggtgtgcagtggtgtgatcatagctcactgcaccttgacctcttgggctcaagcaatcctcctgcctccacctcctgaatagctgggactacagatgtgtaccatcacactcatctaattaaaacaattttttttttggtagagatgggatctcgctatgttgcccaggttggtcttgagaactcctggcctcaagcgatcctcctgccttggcctgctaaagtgctaggattacgggtgtgagccactttacccagccttgggtcttccttgactcctgactctcaaacctcatattcagtccatctgccagtctgtgggttcaatcttcaaagcaaacccagaaccttactacttctcacctctccccagccaccgctctggtccaagccaccatcgtctctcacctggattagtgcggggctctcttcctggtctccccacttctgcccttgtccctcttcagtctatttctatgaggccaccagaattatcttttttaaaaactgaagtcagatcatgttgctcctctgctcaaagccccgcagtgattccctggcacgccgaggggaaaaggcaagatcctcccaaaggcctgtacgatctgcccccggcagctccctggcctcttcattttgtgcctcctctgccccctctgcagagccacactggccctggtagtttctagaacacgtcacgttcatgcctgcctctgggctttgcatgggccttcttcccaggcacaacgtggggctctccccacttcttccaccctacagagaggccggccctgatcagctgttttataatagctcctcccgatcagtactcctgatcgctccctactgtgctgtgccttttttttttttttttttttttttttgaggcagagtctcactctgtccattgcccaggctgtagagcaatggcgtgatctcagctcactgcaacctctgcctcccgggttcaagcaattctcctgcctcagcctcccgagtagctagaacacaggtgcccgccaccacatccggctaattttttgtatttttagtagaggtggggtttcatcatgttggccaggctggtctggaactcctgacctcaggtgatccacctgccttggcctcccaaagtgctgggattacaggcgtgagccactgcgcctggctgctctgctttttacccatagctctggctctaatatatgacactgcccctccctgaattagaatggaggctacagggggatgctggtctgttagttgactgatgcatcttcagcacttaagacagtgtctggcacagagtaggaacagaatatggtcctgtaacaaatactgaaggttgtgctctgtgcacctgggatagagcaggagcaagacacatcattcctgccctcacagggttatggtctcctaggtgacaaggtagtgcacacttccataggtcttactctgggacaagtactgtgccaaatgcttcctcccagccgcctgatgaggtagctactgttagttatcaagtctgatttacaggtgaggcaaagaaaggataagtaattgacccaaggtcacacctagcaggtggtgaagctgagccatgggtcttggcttcaagaatctgtgctcttacccaccatacctgctgctgccggattcaaacccgaattgcattaaggaatcatcataacctgtttgattgaagctataagggaactttgagcatggtgaatggggcgctctatggaaaaggggttctgggaagcctctgtggaagggaggttttgttaagtgaactcccctggtaaacggagtgattggcccccaattagcttgctgttcggattaactgtaatacatcacactttcgaaagtgaagatatgcctattttttcccctctaggtctataaagtagatttttgccattagtaaaatttaaagtgattgggggctatggttactgagaattcaagaggtagattgacgaaataatatttgaatgcaattttattttttgaaaaatgttttcgagatgtcctgtttttagccaggaagcaaactccaggaaaactctcttttccattaaagtgtggatggtgtactgtaaacaaagactagctctcttgagctgccacgtttctataacttatagaaacagaagctgttttttttttctaaagatccaaactcatgttgccacacaaacaacaaaataaaccagtgtgttccaaaaacaagcatttgctctacccacacgcacagttggaaagatgcaggtttgattgaagaagtcggaagccagtgaggtaatggcagattcttttaggggctcctgttaattttagtaagcttggaagaagcttctaggttgtttagtgtttctattagaaccatcacctcaacgaatttgttattgtagagattgattaggggatctgcttcctttgagcagccaggatcccccagctccagcttctagcctgcttttcttcctcatctctactctttcagaataatgcatggctttcaagtcctgtgtgataggtggcttcttagcgggcctctgaaggggctgagatttgttcctggggctgagactttgttcctttgagggtgcagaggctgctacctgctcaggctgcccccaaattgctcttgtgtgcagtgtgctgcttggggaccagtcctggctctgccaccatggcggacactactggcttcctcttaatctcaatctcttcttctcctttctttcttttttttggagacggagttttgctcttgttgcccaggctggagtgcaatggcgctatcaatcgttcaagcgattcttctgcctcagcctcccaagtagctgggattacaggcatgtaccaccacacctggctaattttgtatttttagtagagacaggatttcactatgttggccagtctgatctcgaactcctgacctcaggtgatccgcctacctcggcctcccaaaatgctgggattacaggcatgagccactgtgcctggccctcttctcctttctaacacaagcctgcttctcagtttcacgcacacataggagtggccacctgaccctgtgttggcaaatgattgcaggctgttgtcaccggtggggctcctggaaaagccctctatgggggattgactctggcatgactggggtgtggatgctgtgctcagaggtgctgcagtaatggttctgctgctgctgatagtaacacaggcagtgctgtgtcatgcacagtaatcctgtaagggagatactatcatgatctctgttcggtggatgaggaaacagtctgaggaaaggcacctgacctgttcaggccacacactaagtacagagctgggatcctggcaccagcatttgctctcaccacctctctgttatgtacctctcacacaggtgcgagtcccaccccagaggggccttgagaggctgcaagtgtcctgggtgggctgcctgcttcaggaggacttattattggggaaaaataccccccctacttattactaagggccgaatgctttatgttcacacaacaactccatgttgtgtgactttggacatgttccttaactttctttatcttggtcttctcatctctgtaaaattgggatcataatggcaccaacttatagttttttttttttttttttttcttttgagtcaggatctcaccctgttgcccagactggagtgcagtggtgtgatcttggctcagcccttgggctcaaacgatccccccacctcagcctcctgagtagctaggactacagacatacaccaccatgcctggctaattttttttttttttggtgggttttgctatgtttcccaggctggtttctaactcctggactcaagtgatctgcctgcctcggcctcacaaagtgctgggactacaggcatgaactaccatgcccggccaaacttctaggtttcttaaaaaagtgcctggcaggccaggcgcggtggctcatgcctgtaatcccagcactttgggaggccgaggcgggcggatcatgaggtcaggagatcgagaccatcctggctaaaacggtgaaaccccgtctctactaaaaatacaaataattagctgggcgtagtggcgggcgcctgtagtaccagctacttgggaggctgaggcaggagaatggcgtgaacccaggaggcggagcttgcagtgagctgagatcatgccactgcactccagcctgggcgacagagcgagactccatctcaaaaaaaaaaccaaaaaaaacagtgcttgttgttcttttgttgttattgttaaaggatcattatctcattatcaacaacattggcaggtaattgagcaactgtttgtctccttgtcaatgtggagatagaaaattgcctacgaggttggacaaggtgctggagcagcgtcaaggaagagagatcgaacaagaagactgctttgcccttggacagctttgtttctgaagcactttctcatattctcccatttaatcatcccctccctgccaacttttccaacaggtgcatacttaggtagagctattctttatcagcctggggctaagatttgttcctgggcaggttatctttgtctctgcctggatagaggcaggggcagtagagttgtcatgcattccagactactagctatgcagaagcaggagcaaggtaagagcagatttgtatgaatgagggtgtcagggaatatcttagatgtccatttagttgttaaaaaagagaactgatgcctatatttcaaaacccaactttgatctggatgcagtggctcatgcctgtaatcccagcactttgggaggccgaggtgggtggatcacctgaggtcgggagtttgagaccagcctggccaatgtggtgaaaccttgtctctattaaaaatataaaaattagctgggcgtggtggcacacgtctgtaatcccagctacttgggaggctgaggcaggagaatcgcttgaatttgggaggtggaggttgcagtgagctgagattgcaccaatgcactccaggctgggcaacagagcaagactccatctcaaaaacaacaacaacaagaacaacaagaacaaaagaaaaaacccctaactttggagaggttatctcctgaaaaggagggttttggtctctttctcgcactgctctaaaatagtgactggcacatagtaggtagtcagtaaatatttgttgaatgaatgaatgaatgaaaggtaattggccttccctgctcagttctcattaaaaattctggttttcacatatatgggcagtgtcccaacaggctgctggggggtggccgtttgtgatggcctcaccagtctttcccagagagggaagtgcacatttttaggctacttttgctctgactgatacacttggctgcctaacaaaaagccagagaagaactaagatttttagcatcattcaaaatgcttgccattccttttgctttgtgaaatcatgagctagttattttgagttcacataaaggtcagaacttgatctggggaaggaggttccccttggtttatgtgaggggaactttttcgcccttctgtttattttatccaaaggcttctgtttttctcccaagctaaaatctggcatttgttgtagaaagttctcagcttatgtgtgtgtgtgtgtgtgtgtgtgtgtttttaaaaagagctcatattttggctttagttttgattctcagtgattttttttttctgcctgagagttgattttctgcttcttcaaagtccagctctcaagtgggtgcctaaagttgtttcgttttagaggtgacttaatcattttttaggcctttaagtgctgctcccagcttgtgtttccttctgtttttagtttttatgtggggcagggtctccaaagtacacgggctcttttccccacccctctaccctcattttaactgtgcatcaaatgggtcctgtttcttcttcatgtataattttgtgagtcagggaaggtggtgaaggcccttgaaccctggctttgtcatggcccttccttaaggacctgaaggtctcttctcctaagggctaggttggttcagaaagtgagaagggctggaccttttgtggggagaggatacagcagggtccgaacagctgggctgacaccgggcagcagcccagcagcagtcggagctgcagggtcagctcaccatgggctgaacttgggcattgcctgtttaggcagagtctgcccgagcctttcctgctccctgagaatcctcagcatgttttcctgctgagcaaggagtgaggaatgaagcccactacgaagcccgagctgcaaatgtatttatttatttatttatttagagacagagtcttactctgtcgcccaggctagagtgcagtggtgagatctcagttcactgcaaccaccgcctcctgggttcaagcaattctcctgcctcagcctcctgagtagctgggattacaggcgcccaccacgggcccgagaactgagtctcgcccatctaatttttgtatttttagtagagacagggttttgccatgttggtcaggatggtctcgaactcctgacctcaggtgattcacccaccttgaccttccaaagtgctaggattacaggcgtgagccactgcgcccggctctgagctgcaaatttaatagggaaactgaaggaagaggttctccacagcaccagtggggctgagacctgttttcctcaactacctttttttttttttttttttttttttttgagacagagcttcactcttgttgcccaggctggagtgcaatggtgcgatctcatcttactgcaacctcttcttcccaggttcaaacgattctcctgcctcagcctcccgagtagctgggactacaggcatgcaccaccatgcctggctaattttgtatttttagtggaaaagcggtttctccatgttggtcaggctggtctcgaactcccgacctcaggtgatctgcctgcctctgcctcccaaagtgatgggattacagatgtgagtcactgcgcctggccaactgctttggtttctgagtcctccctcctctaagcccgctcagtgtgtgtcattcctgggaggcggtggctctcccaggaccccatgccgaaatctgccttcttcttgtcttcattcccccacctggggtacccctcagtgttttcccattacacagattcacgtttacatgttctagaaacatctgtaagtctttttcctgtttgtaaattgtatatcctctgttagattaaaaaacttttaaaagtaagtgtctttctctgtggtgacctatttgtgtggcatagtataggttacaaagcccttttcatgcattgttttacttataagtaatgtttatagatgataccgaggtagaccctatggggtgcttactatgccaggtctgttctaagaatgttatacacattaccttactaacccaccccaaccatccattgtgttattgtcacccctgttacagggtggagagaagaaggcagagagaagtggaatgacactcctgaggctaggcatttgccaagtgaggtctgggatttgaacccaggcagctgaacttcagaatcctggtgtttaaccactataccatgctggccttcatgttattgagcaggataaggaattgtcactcttgacttgtttttgaaacatgaaaacccttctcttaaattcaaaagtaatacatagctgggcacggtggtgtgcacctgtagtcccagctacttaggaggctggggaagaggatagtttgagtccagaaatttgagactgcagtgagctctatagtcatgccactgcactctagcctgggtggcagagtgagaccctgtcaaaacaaagcaataacaaaaaaaaccaaagtaatgcgtattgcagcaagtacttaaataatgtagatgcataaaagcaaaaagtgagaatccccactcctcctccagtgctctgagatagactgaagtaactcttcagggatgagtgtaaacacaagggatgtcctcgaagactttccacttggaaagcttgtgtattttatacattaagtatcataaatatgtagttaccctaatgggtccccgccattgctctgcaggcagtgggctgaggttcaggagttaagtcagccccagggcacagggtggtgcaacagaagagcctgagtcgaatccagatctcccctctccactgtgactgtttcctgggaaactagtcaggggctggttttataggaattatccagtcgtattattattattattattattattattattattattattattattattgagactgagtctcgctgtgtcgcccaggctggagtgcggtggtgccatcttggctcactgcaacctccgcctcccaggttcaagcaattctcctgcctcagcctcccaagtagctaggattacaggcttgagccactatgtccaactaatttttttatttgtagtagagatggtgtttcaccatgttggccaggctcatctggaactcctgacctcaggtgatccgcctgcctcggcctcccaaagtgctgggattacaggcgtgagccaccgcccccagccttccagtcgtattcttgacaaatggttttccatgaagttgtggacaccttccagggtcacaattaaatggttaaatgagtcacgattaaataatgattgtgggtacctcccagagtttcaatgaaaaagggaattaactttggacacagacagaataatgcaaatcttcagttttggtttagaaaatctgaaacctgcagtggggaatacagaaaagaaggaagtagaaggagtctgtccccaaccccgccccttccttttttctctcctctggagagagaagggattaggaggcctcctggaaaggagtccctttcctgtgatcaaactcaccccttccctccaccagagcaattacagagcctccggcctggaaccttcctcaccggcctggaggagacaccattctgcggacaatggggggaaggaaaggaaagcaatgccgctgccaatggtgcggatgacttcctcaatgccagacttgcttgcactttcaaagtccctcctcggaggtcccctggtaggacctggagataggatgtgctttcactctttacagactattgtccaggaaagaaagtttcagactttcttaggcagggaagggccctctgactgtgaatttatttggaaatttgaaagagaagagagtcttatcctaggaagtgttctttttctttccccctggatttgacaggccaggcaacagcaattatccaaaccactgctctgcaccaagaggcaaaccacaggaaaaagaaacccgaacaagcaaggagaatagaagttccccaaagcatgccttcttgtttttctcagaggacagtcttttcattcatgttttacagattggtccaacaagtgcagttcttctagtctcctatctagataagcaggatattagaaggaataggagaggcctgcaaaaagctatgatagggtggaaataggataggagaaactgaaaaaaggggaggcgtgcgctccaacacctccatagcccttggggacgggcttagtttctaatgagaatacagaaggcccatgtctcaataggccccgaaaaatattaatccagcccaatatgaacagtctgctaattatatgactgggcctgcttaggagatcagggcaatattacattcagagtactcagtttaggaagatgacacagtgtaatacatacagatttccatcatttcttttattcctcatttggagaggcaacagggctgagatagacatgttagcgatggctagattgattgatttattgactgaatgaatggcctgctttaggcagcgggaacactgaatgaacattttaaaatcagctggtataggtcaggaactgtgcaggttgctgggaatgggtagatgaaaagacattgctatggtttggctgtgtccccacctaaatttcaccttgaattgtaatccccatgtttcaagggtgggaccaggtggagataattgaatgggggggtggtttctcccatactattctggtggtagtgaataagtctcacgagagctgatggttttataaatgggagttcccctgcacaagccctcttgcctgccaccatgtaagatgtgactttgcgcctccttccccttccaccgtgattgtgaggcctcgccagccatgtggaactgtgagtcaattaagcctctttcctttataaattacccagtctcaggtatgtcttcatttgcagcatgagaacagactaatacagacatggaccttggctgtagggagtttgcactgtagtgacggcaagagctcacgtgatccattttaagatagaagagcgagctcaggcagaggaacacagagccaggatggtccatgcacggaatctggccctgcccttactttctccaggagcatgggctgggtccctctcctccctaatcctcactttgctcatgtgtgaaatgtagatcaagtaagttctacactcagaggtctcttgtgaagattaaatgagaaaaggcatggaaactgcctttgcacacagcctggtatatcctgatgtctgctgatactcttatttttatgttccttgacattccaaatctgccccagggagaattccaggacagctctggagaggaagtgatctttgaatccaaccttgaaatcaccctaggagatgcaaagaaggtgacaccagttaagaataagatgtgtacccattttcaaatgttcttttttttttttttcagatggagtctcgctctgatgcctaggctggagtgcagtggggtgatctcggctaattgcaacctccgcctcccgggataaagcgattctcctgcctcagcctcccgagtagctgggattacaggcgcctgccaccatgcccagctaatttttgtgtttttagtagagatgggatttcaccatgttggccagactggtcttgaactcctgacctcaagaatccacctgccttggcctcccaaagtgctgagattacaggcatgaggcactgcacctggcccaaatcttctcagttctaaatggctgtgataaaaactacattgataatttttttttttttttttttttggagatggagtctcgctctggtgcccaggctgaagtgcaatggcgcaatcttggctcactgcaagctccgcctcctgggttcacgccattctcctgcctcagcctcccgagtagatggggctacaggcgcctgccaccacccccggctaattttttttgtatttttagtagagacggggtttcaccatgttagccaggatggtcttgatctcctgacctcgtgatccgcccacctcagcctcccaaagtgctgggattacaggcctctgcgcctggccttgcattgacaattaatttgtttatggaaagccagttatccaatgatggtgaacaaatgcaacttgactgtataatacttattttggttttggaccaaagtcaccattaaatatgccaagttcttgttcaaggaaacagctaatgtcgtggacttgcatctcatttgtagttggttctccctgaaaagtcagtggtgtgggagaaatgatacttagtcaaaatcatcagtgaaaatcattgcttggatcatcccaaaatataatgaacaaaagtgatatttatctgccacattgagaaacattcaccatatctcaataagctctcctcagccagttggtccttttgtggttgaaaaaagtgccatatctttggttgggcatccaataaaatatggtatttaggggctacctgtatggaaaatccatatccttaaaggttagctcaccaggaggatgttgagaaatggcacaaggggctgggcgcggtggctcatgcctgtaatcccagcattttggggaggctgaggtgggtggatcacttgaggtcacgagttcgagaccagcctggccaacatggtgaaagcccatgtctactaaaaatataaaaattagccaggtgtggtggtgggcgcctgtaatcccagctactagggaggctgggcaggagaactgctggaacgcaggaggcggaggttgcagtgagctgagattgcaccactgcattccagcctgggtgacaggcaagactctgtctccaaaaaaaaaaaaaaaaaaaggcacacaggaattgggttgggactcagtagatcagtagatttagatctcccagcttagtctcatctccatagtgtgggtggagtagtactcacactatttaaattatttttatttcactacctgaatcccctcagcaagtatagtttaattcacctgagtaatacgcttatgcgaggggatttctccatgggccttttgtttttgctcctgctggtgatctgattttaaatgtgaacgtgccattgctaagagtttttgttctatgtattattctgtgtggaaaatttcttaaatgggattattgaagtatacttcattatttatcttctggcaatttatcaacaacagcaaatatcattcattattgtttggaggacagaactatttttatattctttaattaaaaatggctttgacattttcaaattcagagggaagttgataatttagtgctgtatgataggacctttagttggtctgaatgtcacataattgtacaaattgctgttaaagtatattattacttattttctgagaggtagagggacttggttatcctgggattgcataattattggttcactagaactacagatgagtgaaaagaagggttagatactctctagttcacttttcttccagtgcagggaacattctatggggttccgaacagatataataagctcataataacagtggccattgattgaactctttctatcaaacaatgtgaaaaacattagtagaggtgatatcttagtctgcttttgctgctgtaacagaatacctgagactgagtaattttttttttttgagatggagtctcactcttctgcccaggctggagtgcagtggcgctatcttggctcactgcaccctccgcctcccgggttcacgccattctcctgtgtcagcctcccgagtagctgggactacaggctcctgccaccacgcccggctaattttttgtatttttagtagagacggggtttcaccgtgttagccaggatggtctcgacctcgtgatcctcccgcctcggcctcccaaagtgctgggattacaggtgtgagccaccgcacccagcctttttttttttttttttttgagatggagtctcgctctgttgtgcaggctggagtgcagtggcgccatcttggctcactgcaacctccacctcccgggttcaagcaattctcctgcctcagcctctccagtagctgggactacagatgcatcacgcccagctaatttttgtattttcagtagagacggggtttcaccatgttgtccaggatggtctcgatctcttgacctcatgatctacctgcctcagcctcccaaagtgctgggattacaggtgtgagctaccacgcctggccatttttttttttttttttttttgagacagagtctcactctgtcacccaggctggagtgcagtggcatgatcttggctcactgcaacctccgtctcccgggttcaagcggttcttctgcttcagccttttgagtacttgggattacaggcacctgccatcatgcctggctaatttttgtatttttgtacagacggggtttcaccatgttggccaggctggtcttgagctcctgacctcaggtgatccactcacctcatcctcccaaactgctgggattacaggtgtaagccactgtgcccagccccaagactgagtaaggggtgagcagaaattcactggttcacagttctggaggctgggaagtctcgtatcaaggtgccagcatctggccagggccttcttgctgtgctatcccatggcagaagtacagaagggcaaagaaagagggctgaacttgcccttttataatggcaccaaccccacccatgagggtggagtcctaatggcctaatcagctctctgagatcccatctgttaatactgttacaatggcaattaaatttcaacatgagttttggaggggacagacattcaaaccatggcaggtggcaagaagtatcaaactactagatccttgggattgtgctttgtactggggtgtattttttccaacaatcctaaaaatcatttgaatagagatagcaatatatatcttacccatttggaaatgcacagagattcaggagtgttcacatagaaacagaagatcattggcttttgtccattcccaacgccagtgatctgtttttcttgactctttttgatctgtgtttctgaatgtgttgatatactgcgctactggtgtgcaggatgattttaaatgttgcacagatgaacattaatagtcatctattttaatatgtattaggaaaaagcccataaaacaatgaagcccattaaaaccccatggtttcttggatagtattacatagggtgaagctaattttatttcagtaaaaaatatgcaggtcaatttaaataaaaaaatagataatagtataaatggcttgtggctacagtaaaaatgatgatggtacttgaatgtccaaattaatttaagtgatatatgtgttcatagataccatttcattttaacgtggttctgctggtcagaacagtcttacgatgggggtggtctccaggcttcaccttgtgcccactggctctgtttggttcctctgggctcacacacagggagctacgtatgtctctctcatttcctttggtatgttctctgggttaaatgtccccagctatctgatctgttccctgcgggccttggccattcctgtcctggcctttactggcagtctctattctaaaatgtgggcatcccacatgaggtccagcttctcctgagatccccggaggtgcagctgctgtgatggtgaccttgtttagcagatgctccctgcagtccaaactcccacccatcgtcctgccctttgatccatttcccatgaactgcttacctcagttttctcatctgtaagatggagagataactgtaagtgcttagcacagtgtttactagcacagactactgctattactgtcaagtcacttttcctttgctgccaataggtcattttctgtttatggcttcttcagtatgaactgatcaactgtaacttgaaaatttccagacttaggacttttggactcatagtgaaaggatcctttcccaattcccttgatcggtttttcctttaaaaaaaaaaaagatatttgacatcttttcactttcaagttcagtttctcttctcctttttttctgggtgatggtttattatttaaaaaatttctatgtatatgtgatttaaaagtaaacccacgtagctgaaaatgtctcataggtttttcttgcattttcagttgacccattcactttgcaaatctttagagtattatatttaagacagcttgcagctgttttcttatatatattttacatgacaaaattatatttaaaacatattaaactttaaaaaaccatagtttataatttataagccatgtagcatatttctatttttgagacaggatcttactctgtcacccaggctggagtgcagtggctcgatcatggctcactgcagccttgacctcctgggctcaagtaatcctcctgcctcagcctcccaagtagttgggactacaggcacatgccaccatgcccagctaatttttatattttttgtagagatggggtttcaccacgttgctcaggctgtaatttttaaaaactaaaaaaagaaaaaaaagtgtttacaggactttaaattgagaaacttaaatatctttacatattctgtgttcctaatttatttttgcagcagtaattatttcagctgtctttagtattgacatgttggaacctcggattaatttgtgcatggatatatttagagccttttacttgacaagaatcatgtatatcatgactgaatttgtaatttcccagcatgagacccaaattaatagacagtatttagattctaggcaacgatgcattatataaaccagcatcatttagggagtggcaaagactctctccccaccagttctgtgaacttgggcaaggtgtgtaatctttctgagccttaatctaattagaccctttctcctgtaacccagagggggtgttagtaaagttggtgtgaaaaaagtcaattattgtactgatgcaatttgggtgaaactgtgaagttcagtgttcacatgatggttgtggagacactgaaccttaatccttaggccagggattcaaagttttttttgactctcatgttgaacgttgtctaaagtgcagtgtgccctagtttttaggtaattctgagaattctaaggcccttgctggaataattaatgagaatatgagatttcagcaaattagggccaggagtcagtgctctcagcatggaagaatctcacctccaaaaattttatgtgggttttacacattaagcaagcataggtgaggtgcagtgaaggggaagtgatggctgtcagtcgtttggccaggttcctttgcatacaggggagctagtgggtgtataccagctgagacagctgaaggaggagaacatgaagaatagttggaaactattgaacctccaagatttttctgtctttgttaacaactagcagttacatgctagcattatttatttatttagttagttagttagttagttcttgagatggagtctcactctgtcacccacgctggagtgcagtggcatgatctcagctcactacaacctctgcctcctgggttcaggtgattttcctgcttcagcctcctgagtagctgggattacaggggcccgctaccacgcccagctaatttttgtattttgagcatgttggccaggctggtcttgaactcctgaccttgtgatccccctgcctcggcctcccaaagtgctgggattacaggtgtgagccactgtgcctggccttatttatttatttttgagacagggtctcactctatcacccaggctggagtgcagtggtgcagtcatagctcactgcagcttggaactcttgggctgaagtgattcttcttccttagcctccccagtagctaggactatagtgccaccatgcctggctaatttaaattttttttgtgtgtgtgtgtgtggtggagatgggttctcactgtgttgctcaggctggtcttgaactcttgggcttaagcgatcttcccatcttggcctcccagagtgctgcgattacaggcgtgggccaccacacctgtcctgtgctaggctcttaacgtccttcccagatgttatgtcccttcccttggtggctgctgctttctgccacattttaccttgcctttccgcaccttctaccatgtctccttttccagcctcattccctgagatgtagccggagttccagttcagccaacctgcccgttgttttctctcctggaactgggtgtttgagcctcctgcatggagtgttcttccttcccagctaaagtcctggtcatcccatttccatctgaaaggcccccttgttcatgaagcctctcatggtccttccccctaccccagccaggtatactttctctcctcttggaattaccctataggaagaacatggtggcttgacctgggttccagtctcacccatctgtttacctggggagtgatcttgagtgggtcaatttatgttctcagtgccttacaaaatggggcagaggatacctaacccccaggagctggtgtggctggggtaccttacacagggcctgactgtagtagcttctctccaagcattggtgtcttacctcttctgtttctctaatggtgttttgcacattcattgttgtattagagtttgtttttttgtcttaccttgttttaataaattataatcttatgggagatgacactgtcttttctttgtttcatatataaaaagtgttttgctgatatacgtagaatcaagttggtctggagttactctggataagggatgaaatcagggagctcttgtgttcaaaggggccttcttcccttttttggttctttctcctcattttttagcttccatttttacttcctttagtattgagaaagtaccaggctcacttcaaagagttgacttcaaagctcccaccagctcagacatacttgccactgaagcctgtaggaattggcatcaatggaagaccctgtggcggttgcatttaagattttttttgggacttctatttttataattcttttaaatggtaaagggggagggttacaaaatatctgcgcctttaagatatcaaacataagccagtgaagttccaaaaaaaaaaaaaaagatgtcttagagaaatgaaaaggattttacaattggtagaaaagaacaactcttttttctttttctttttctttttttgtttttgagatggagtttcgctcttgttgtacaggctggagtgcaatggcgccatctcagctcactgcaacctccacctccccagttcaagtgattctcctgcctcagcctcccgagtagctgggattacaggcacgggccactatgcccggctaattttgtattttagtagagacggggtttctccatgttggtcaggctggtcttgaactcccgacctcaggtgatccacctggcttggcctcccaaagtggtaggattataggcatgaaccactgtgcctggccaagtcttttttctttaaaaaaaaaaaggttacttttactgttttgtcctagttacaagatcttaggacagaaataaagccttaacttgtatgtaacattttccaagatggctaagtggagttgcaggttacatagcagaaaacagaggcttgggcctgttgagacctcacacccagttcttcttggagctgtgggtgtgggctgaaagagaagacagggagattaaagaccagtgatttccctccatggaccctttgatgctcttgtttgttgactttttgaggcttggagtgaccgactcttccaggaatgagaaatggaatccctcccagttttgatggtcgtcccaggacatatttcctgaaggcctactctgtgtctcagcaccattccaggactccccccgacagccttacggagcgtgctacagtcttcctgatccaatatcctgccacctgcccactcattcaccctcggccctaccccatgcctttgcacgaatctttccagcctgagcagcctgagatgggtctttttccctgctccgaaatcctgacctcataatggctcatgaatccctattcaaccttcaagacctggttcaagggttaaatcctttaaggagacttctcctgatttttccccagctggttgctttgttctccagcgatttgtaaccttgtgaacaaatattctactcattttattctactggaatgatctatttacacttatctccctgcaaattgtatcctgcccttcaatggctaagtgaatggcataaacagatgctataggaattgagactaagttggagctgggtgatcagggaaggttttaaggaagagatctgggacaaatagctaaagatggattcagtgttttttttttctttttctttttttttttttgaggcggagtcttgctctgtttcccaggctggagtgcaatggtgcgatcttggctcactgcaacctctgccgcccagattcaagcaattttcctgcctcagcctcccaggtagctgggatgacaggagcccaccaccacgcttggctaattttgtgtttttagtagagacaggttttcaccatgttggccaggctggtcttgaactcctgacctcaggtgatccacccaccatggcctcccaaagggctgagattacaggcatgagccaccgtgcccggcctgatggattcagtttatgtgcaaaatttaagaggatgggtttcggcagttcaggttgttaggagacaagggtggaaaggtgtcctggagccctacagagatgggcttcaagtgccagccaaggtgtttgaccatttttagaagaggaatgagatgattaaagtggaacttttaggaagagtaggagtgagcgggatggatttaaaaggcggagtgagaggcatcaggaaggctgggtaggagagcattgctacagtctaggagggaggtggcaggggtgtagaccagggatcacaaagcaatggcttgccatctgcttctgtatacccagagagctaagaatggtttgtaccttattaaatggttgaaaaaatcaaaagaatatatgctgtgatatgtggaaattctgtgaaattcaaatgtcagtgtctgtaaatagttttttttttttttttttttttttgtggaacacagccatacttttcatttatgcattgtttgtggttgctttcacacaatcatgccagccctgagtagttgctgcagagaccatatggcctgcaaagactaaaatatgtacttatgtactatctggctctttccagaaaaaatcagcagaccccaggtgtagaccaaccagggtgaatgagtgtatgactggaaatgcaaagacgggcaggatcaagggacagtttagagcaggggtgtccaatcttttggtttccctgggccacactggaagaagaattgtcttgggccccacataaaatacaccaacactaacaatagctgatgagctaaaaaaaaaaaaatcacaaaaaatctcaaaatgttttaagaaagtttatgaatttgtgttggtctgcattcaaagccatggtgggctgcatgcgggccatgggttggccaagcttggtttagaggcggatgcagtacgggagagttttcccttctcttctgatgtaactccatgtcttggtggcggtgttctagatgtaggcatctttaggcaggggagtgtgcgtggaagggtgaaagggttgtgccttcatgacgctcgtgtgtgtgtgtgtgtttgtgtgtgtgagtgatgctgagctagtcttagagtaaatgcagacactggatggtagcgagttcagtgcagtttttatggagggacagcttgctgcctgctgatgaagctggacaagactgggtagtgaagtcaaaggcccacacctaactctgaggctcttgggggcaactgtgttgtgcagagaaggtaggagggcagaggaagaggaggagcggcccctgggagaatgccttctacccagctgcagcttctcaagggtgtgtttgcgtctgacctaaggtgttggagctctttgtttctggctgtgttcaggctttcccccgcttgcctttaggggaagctgatgactgctttagcgtaaagagagggccaggaggtcaacttccctacagtcccgtgcctgcttctgggttggggctggggagagtgctgcccactgaactctctaaatgttaaaagatacaaagaggaagcacagagtgaaaagggagaccccagaggacagcagaacatcccgaagcatatcccccatcagagaagaggcatgattttcacctggcttgcaggtgcaggatgggcatctcagatgctgtgagtctgagggcagatgcccatcagtccaggacagttcctggggacaaaagcctcttctcacctttagagaaattaagtcttattggtagaaaatattttagagaggttctggtctaagcctctcattttgcagatgagaaaccacccaaggcccaagatggatggatttatcaaagccggttggtactggaacttggatttaatttcaggtcttttattattactatggaacaaatcttaactttttcaagtgcataccatgtgcccggctatgtgctggatgtagatgctttatctgcaggtttaatcttcactacaactatgggaagtagctattgtctctcttttgcaagtgtgaagagtgaggcttagaaaggccaacttgcctgtgatcgggtaactcaagagggaaattggatcagagtccatctgagactgactccagagccaatgttcttagccaataggggcacataaaactgttctgagtggcttcctagctcctgtttccagtgtccaatccattctcggtttctgttcattcatcagatgtgcactgagtacctgcaagaagtcagaagggtgttgggttggtgaggacagattgtataccatcttggctttggccgagccaaacagaatgccaaagatcggcaaagatagggaatgattgttcttggcctcagctccacgctcccctcctctgtaaaactgcccctgacaccccggcaggattgaattcctccacctttaagctcccagagtaccttagctctgtctttagcacttcacactgtgtcatgcctccccttgggccctaaggccaagagcatgtgccatttatttttgtattcctacttctatagcccagtgcatattgggggcactcaggaattgctgagcgaataaaagaatgaatgaatacagacccagattgtcaatgattctcaaaccttattttacaaaagaatcacttgaaaagctggttaaagatcaaaactcctgagccctactcctggtgattgactcctaggtttggggtgggaccccagaatctgaatttcccggaagcgcccaggtgtttctgatgcgggtggtctgcaaaccacacttgcagcaaccctggcacaggtgcccagccttctggaataaagacaggaactaagcattaaaaatagcacgccattcatttgcttgtgccgagccgccaagtgccccctcctgccggcgacaggtccggatgtgggccagttctcagcccagggaaaatgaacagtgtcttctccgtggtgcccagaacagtctgagtcagtggaatgtgctggccagtcaggcagaagggaacttccacttcttttttaaaaccttggtggaaactgtgctggcaaggcaaacagggaggagaggaagctccatgtggggcttgggcttggcggacgacttggggctggccggactttgggtggccgccgaggaccattgctaaatatgcccctttcgtcctgaaatagtcacttccccggctggcttttgtgttggtcggtcgccacaaatgtgtggctgttgttcaaggaggcctcctgggatataaaaagagagaatggggccaggctgcggccagggctgtgtaggaagacaggagagctgccttttctcctgtcccaccacggactcattgtaagattcagagggagtggcttctgggccctgggtttacttttccatctgtaaaatgggtggggggaaggggcagcatcataaagcttctttcttctcctgaaagggatgttttaaggcccatgtcaagattgaacacagggctctgttgttgggctgatgctactgatgaagtctcaggaagctcgaagtttgtagttaactctttcagggtagatgtggtgaatagtctcttggtattgtgttgatggtggcccactagaacagaaggtcccagagggcaagggcttggtctttcttcttcctctctgtatccccactgtttagaactgggctgggtgcagagtagtctccataaatgtttatggggccaatatctccaaatattggcacctactaagcgtcagtcccatctctcttttgtcttcttcacaggtttaacttgctgtttgagaagaggcgatatgaggagcagggcatttttggaggaagaaactttacctctgttttcaacgtttcatccagtttctcttctttttacttatttggagacatggtcttactttgttgtccaggctggaggctgaagtgcagtggcacaattatagctcactgcagcctcaaaacacctggcctcaagtgatcctcctgctttagcctcctgagtagctgggaccacaggcttacaccaccatacctggcaaattttttttttttttttttttggagaggcagagtcttgctccgttgtccaggctggagtgcagtggtgtagtcatggctcgctgcagcctctgtctcctgggcttaagccattctcctgcctcaccctttgagcctccttaattttttatttatttattttttttttgtagagacagggtctcattatgttgtccagcctgatattgctatttttttttttttaatggcgatgtagtaatcttgctttgttgcccaggctgttctggaactcctggcttcaggtgtgtgccactgtgcctggcccagttgctctttacatggtggaatatcagaggttaaagacttggtaaaaattcatgcggtgcaataaaccatgtattacataataggggtgacacttgttaacttctcccaggctcagtttcctcatgtgtaaaataggtgaatagtatctaccctccaggagttgtacaaggctcatgtatacatagtgtatgtgaatgtgctgtatgggtgcaaggggttgcagaagtgataatgtgtgtaaacagatggtgtggttggctcattggaggggtggaggccctaagtgagatgacctctgaggtttactcttcctagagtagttggaaagcaattcagcctcagtggtaagctctcagctcttctagggcaggtccctcttccaccaccctgtgtctgcaagcattttggtattaagttgtttttctaaggctgggtgcggtggctcacgcctgtaatcccagcacttttggaggccgaggtgggtggatcacctgagatcaggagttcgagaccagcctgaccaacatggtgaaaccatatctctactaaaaataaaaaattagctgagcgtggtggtgtgcgcctgtaatcccagccagctacttgggaggctgaggctggagaatcgcttgaacccgggaggcgaaggttgcagtgagctgacatcatgtcattgcactccagcctgggcaacaagagtgaaactctgtctcaaataaaaaatattatttttctaaaaagctcttattttattgtgaaacacttaaattagcaaatctcaggcttgctgaataaggcttcccaggcaaaccacatcccacatgtgcaaatgtctggtgacacagtgcttcatttttttccactagtacttactactacctgacattatagtgtaagtttacttgtctatttgtgtatggtctgcctctcctatgagaatgtgagctgcatgaggtcaggacattgttttgttcactcatgaattcccagcacccaggacagtgtctggcatgtagtgagtacccagtaaatatttgtggaatgaatgaatgaatacttaagtgggtgggaagttcttggaccttagtctagacccatggttctcaaagagtggtcctgggactcttggggattcctgagatccttttagggatctgtgaggtctgtgaggtcaaagtatttttataataatagtaaactatttgtcctttcactctcattccctcatgtatgcaaatctcagtgaactgatattttccaaataaccaatgcataaggccacaaagccatgcagggtaaaaagagctatgaacaaaagttttctagagaagaatttggaggaaagagagtttattctagtgaacagatcgcaaactgggagatgctgcgttggtgtaaaatgaaggtgcattccagagagcaaagagagaatctagttttttgttgttgttgttgttttgttttttaaattttgagatggagtcttgctctgtttcccaggctggagtgcagtggagtggcgtgatcttggcttattgcaacctctgcctccgggttcaagcgattctcctgcttcagcatcccgagtagctgggactacaggcacttgccaccacgcccacacaccctactaatttttgtatttttagcagagacggggttttaccatgctggccaggcttgtctcgaactcctgacctcaagtgatctacccgcctcagcctcccaaagtgctgggattacaggcatggcagaatctaggtttttatagcaaaatttctggcccatgtccccaatcaggtttgattatgcaaatgaagggggcgggtcaaacttgcttagttctgattggctgacacagctgagttctgattggtgatacagctgagccctgattggttgatacagctgagctctgattggctgaagcagacgagctctgactgcttggttcatgtgagctctgaaagtcccaagtcaaaagggtgtggggttttgtgaaacttggagtacgtagtgtgacctctagtcagcaaatggccacttggctgtattttaaatttaggtacactttgctgcttggggtccatcttgaggggattgcctttttcaggttcatgtttgttcacagagccattcaaagtgcagtggatacattataaattgtacaattatttgtaattaaaaaaagaacaacagcaaaaaacccaaagtgcagtggatgcaaagaccaatggattttcatgtaacagaatatgaaaagttcaccgacacagtttcacattccacgatgcagagaagtttttaataactgccatccacatgttgagttttggtgtaacagcaaagaaaaatatccacaactactgaaaaggctgagaaaatactccctttctcaactgcatgtttttgtgtgagtccagaatttctttacattattgtaacagagtgaacgcagaagcaaatatgagaatccagctgtttcttactaagcagacattaaagagatttgcaaatatctaaaataatgctatctctctcacttttttttttttttgtattggaaacatcattttccatacaatgtcatttatgttaacaggtgacagatttatttatttttattttttatttttttgaaacggagtttcactgtgtcacccagccacccaggctggagtgcaatggtacaatcttggctcactgcaacctccgcctcccgggttcaaaggattctcctgcctcagcctcctgagtagctgggattacaggcacccgccaccacacttggctaatttttgtatttttagtagagacggggtttcaccatgttggccaggctggtctcgaactcctgacctcaggtgatccacccgtctcagcctcccaaagtgctgggattgcgggctgggattgcgggcatgagccaccatgcccaacaacagatttattataagcaaaagctctttggggtcctcaataattttaagagcataaaggagaccaaaaagtttaagatgtgctggtcaagacagagccctgtggactatggaagggattgaagccattctgtggatcctataggcttcttttctaagcgaatgattagtgtttattcagtagccctatgtcaggtggtttctgtatgaatgagaggtttgcctttccagctgcggcggggctttgggcaagttgctgtctctgtgctccttcgtttgctcatgtgttaaaaactggcccaggggtctgggggtggggtggtaagaaaatgggttgagtctccttcatctctaacattttcatgtttaattcttggaacctccacttgttagctctgttcactcctctgaaagagattggtgagaattgaaacagtgaaagaagattttagagaaaaggtgacatgtaaagctgaacaagggttgcctgtgaggcaggcaaaaaggacatttattatatttaaaaaaaattttttttttgagacggagtctctgtcgcccaggctggagtgcagtggcatgatctcggctcattgcaacctctgcctcccggttcagcgattctcctgcctcagcttcccgagtagctgggattataggcacacaccaccatgcctggttgatttttgtagttttagtagagacggggtttcaccatgttgaccaggctggtctggaactcctggcctcaggtgatccactcgcttcggcctcccaaagtgttgggattacaggcgtgagccaccgtgcccagcccagaaaggacatttatatgtggggaccactgcatcttgcagatgggtaaactgaggtagcgacaggtgaaggctcagttacattcatcctgggtcccagactgtctccaacctgtagcctgaagctttgtttccttcctccctagcccaggatgacagcagtgaccttccatgggatcttttcctgggatttattgagccactgaggtcattggcctcaggccacctgcgtctctcgactgaccagttattcttcaaggaagacactgtgtgtgtgtgtgttttagttgctcttctataacttccgggtgctcttctcagagcagcagtgctttaaaaaatgtctgtgtgtgtatttccccactttgagccatgaaatatgttcagtctgttttttttctagtccaaagtatttccatatcattgtgcacctgaggaaatgcatactttgatagaaaatggacaaaaaagttgtattggtagaattaaatgaactaatgcatgtcaagcactgagcactttgactcaatagtaataataataataataacacaatgtatcattatgatagtgttatatctctttagcaatcttgatagttgacttgtataattcacagtacagaagcttattctaaaactaaaatgctttggttctcctgtgtgccaggaacagcagtaaactttatgtcctaagattagtatggttggaaatgcatgtggcagtggttcccaaacactggtgtgcagatggaacacagcccgtgaagttttcagcggtccttgttaaaaagagataaaggaaagagataaaggataaagtgctgagattctcgtgaagctaaatgaagctaaataaacatccttcaatgagaatatgtccttcctatagtttttggaggaaaatatttccttttgtgagacaaaagtgttagtaggtggtaagtactttttatttagcatagtacaaagttgtggccctctgtcaacccttcacattttggtgtgtgtaatgtttgaaactgcattggtctgtaaaatcccaaacccaggtagataaaaccaagaagtgacagggctggaagggatcttaggaattagttcataaagaacttcaggctcagagaagacatgtgagttgcctaaggtcacacagcaaatctgaagcaaatcagggctagaaacccatagacgatggtcatgagcactggttttgagtcatccatttgaacacacctgtgttcagattctacctctgttacttatgagctgatttcttacctgtgaaagtgggatacctacccaaggggttcacgggaggatttaataagatgatttggattaggaaaaactgacaaatttccccttccttcttctccctgccttcccctcacctgttaataaatagatccttgtgaaaggtcagtgagcagcatcagccagaagggctttgttttcagcaaggtccctgcatgtatgattacaatcctaagtaatatcagctgttgcttgcgttggtttctcagctctctcttggtgatctctctctttagctgttgaatgagttcaaagatctaggaagagctttgaaacccctctagcagcatttctgtctccagtcccagcacaggtctttggaggatgagataaaaagggttttgcccagggtcaaatgctgtgtacacgcttggtcactcttccctttcttgagatgacatgtccccttcttggagacccaagatgattgacaacaataacattcctttacaacgttttcttctcatctagagcactgggaggctgccttttaacagagatatcacagagtagcaagcatgcagacattctcatgacatcctggcagatatcaagaccaaagaacatcccatgttccctcttgaaggcttgtaataactgccataaattatcttgtgggaatggagtggccctggcctaagctgtgctgtaccggactctcctggtgacagttttagtggctgcatatgtttgcagaagaaggaagcgtggtaacttggcaaacagctccaaacgctcctggcttgctgccacaggattgtccttgagacttgggcacagtgatgtgtgaaaaatgcccacctttgctcttggtgtccagtgggccttctatgggccctctatagaggtcatcacctggggattcctgactctggccaggtcctgaggtctttccatgttactctccatgttacttgagtaacataagagcttcttatggctcttatgttctgcaggacggatgaactaggtacccaggacaggtctgtttgtgcacaaggctgtctccttctccccctccttggtttttctactgaggctttgttgtgcttggctcagggtgatgttagcaaatgcactctccaccctgctgtgccacattaaggaaacgcatgttgtattggcttctgccaagtcagctcacatgctttgttttagtgactctgtgaagagctcatcatctattatttattcaggtaacacacttctatctcctaatttcggtgctactcccatttttcatccccggttagcgtgctgtgcgccaggagggctgcctgttgtctttaagaaccactttgaacatttttgctttggttatttattcataccaacatgttgttgttaaatgacgtgaaataaaaccccattttaaaaagaaattgtaaaaggaagctatgtcctgtgtggaaatcatgacaagcccagaaacatgttacaaaaacattaaccaggagcggtggctcacgcctataatcccagaactttgggaggccaaggtgggcagatcacttgagaccaagagtttgagactagcccggggaacatggtgaagcccatctcaactaaaaatacgaaaactatccaggcataatggtgcaggcctgtgattccagctactcaggaggctgaggcaggaaaattgcttgaacccgggaggcagaggttacagtgagccgatattgtgccactgtactctagcctgggcaacggagcgagactccatctcaaaaaaaaaaaaaaaaacaaaaaaaacccacacacaacaaaaaataaatattgcctgtacctatcacctgaggagcccattgttaatggttgtgtgtctttttagtcttttaaaaaatgtgttaaaaaatgtagttgtcataatgtccgtatataaatttttaagtggagttgatagatttcatttgaagggctgctgtgtcataaatgtaaaatgcttagcaaggtgcttggcacctggagctgttcacagtaaatggaaggaatttttatggagggtgtaaggtagagtgggctcctgagccagactgccctgttccaggcctggctctgctatatctggctgctagagcctcgagccagccattgaagtgcagtgccttcatttccccacctgtaaaatgggggtaattatcatataccccaaagtgctgtcataaggatttaatgaaatatcccatgtaagatccttagagcactgctgccggatggtcatctcatagtaggtattggttgttattattcaggaaaatgttggaaaacacatttttaaacaaagctggtgttcagtcccctccctccccccaaccaaggaaactctctttaattcccagtctgctgtgattcagtgctggcctgggagcagccctcgagggcagacacagcacttgtcccctacccagcacagcacctgcctgtgcatccttagctgatgaatgaggctcacagccccaggcgccctgcatccttcccttctttctggtaccctcttttgtctcctccaaacacttgctactcaggcttcagggaggaagtaggaagtaggaggtggtttctccctcccagacccccagctcacactggtcttgaagggcgtggcatctgacagagcccggtggctggttttcacgtgtctcctgaagccacccctaaggagaaggcttcgatgtcatcttctggtcagagccgagcacagtggtcctcttcagagacagatccgtgcagcaggatggcacctctgttgtcctcccagactagcagtaggtacacgtgggcttcgcaggctgttttctgccctggaatgctgctgttttttagacccagcatacctcagtgtcagagaaggctggtttgtttgaaacggtcagaatgtcataaataccttatgat[450 bp omitted]cgaggaggaaggcggggcaatgttaggagcctctgtgccttggagctgcaggcgagttgtctggtcttgggtgattcccttcctatgtttgcatctcaattttccctcttgtaaaatggagctgagagcatcccttatatcacaggaatgtcattaggattacttaaggtgttggaatgtttcctggcctaggggaagagctcagtagaagcttgctattgccctaatatcattactatcccagatatgcattttcttgttatttccctgttaggcgttaagtgtgtgaaagtgtgtgtgtatatttaaaaggtcaaagtaaaattctttagaaccttagggcaggatagctcttgtttagttaggggtgtttggtgactgctggagaagtcacctacccagctgatcttacaattactgtctgcttaaaggcagctcttgacttggccttctctaggggaaaaacatgtagtttatgcaacttttcttttccctttctgctctggatttgaccttttgttccttcaggtgattgaaaaaattcgaaaagtcacctgtttcctcagaattgctttaagacaagactaagtgaaccaacaagaatgaagtcagctttttggaaatacctcccaagaggccttgctctttatgcaggactgttatttcaaaggatggtgtcccctccccaaccataagaacgatccaaacctgttttctggggcccagagtttgctgaggataggactgggctgaagctttcattgctggtctgtggggtagaggtaagcctcccctgtgaagctggtaggttacatgctttggcaacatgaattgttatttctggagtcccctgggtgctgtttagaaatgcaggtaggtggctgggtgcggtggctcatgcctgtaatcccagcattttgggaggccaaggcaggcagattacttgagctcaggagttcgagaccagcctgggcaatatagtgaaaccccaactctacaaaaatacaaaaattagccagggatggtggtgcatgcctgtaatcccagctactcagtaggctgaggcaaaagaattgcttgaacctgggaggcgggggttgcagtgagccgacatcgcgccactgcactccagcctgggccacagagcaagatttcatctcaaaaaaaaaaaaaaaaaaaaaaagaaaaagaaaaaaagaaatgcaggtaggtgcttctagctactgctgtgggatagcaaggtagttaccaaactgataagggtagcatcttacttactgctgaaaaattcagtgtcttttttctttttttttgagacagagtcttgctctgttgcccaggctggagtgcagtggcgagatcttggctcactgcaacttctgcctcttgggctcaagatattctcttgcttcagcctcccaaggagctgggattataggcactcgctaccacacctggctaatttttgtatttttagtagagacagggtttcaccatgttggctaggctggtctcaaactcctgacctcaggtgatccacccacctcagcctcccaaagtgctgggattacaggcgtgaactactgcgccgggcttgagtttgactttttgaaaatattccacctataagtgaagttgtgcagtgtttgtctttatgtgtttagcatatttcactcagcataatgtcctccaggctctgatgggcacttggcttgtttccatgtcttggctattgtgaatagtgccgcaatgaacatgggcaaattgccgtgttgagttaaggaagctcttttccagtctgagtttgcaaatagcttttcatatatgagcgttgaatattatcaaatgcttttctgcattcactgagatgactttatgtatttaaaaaaatctgatggcctatattttctatttctaaactactcgtgtattcctggtataaatcaactcagtgtgttactctcgtttttatacatagctggattcgttttcactaatattttgtttgagatttttgcctcagtgatcatgtatgtgattgctctgtaacttttcattcacattttgtccttgtctgtcctggtatcaaagttatattggcttcatagaatgagggaaatgtttatccttctaaaaatatttagtagagtggtctaagatgagagtgtaagtgagtaaactttctcaatcaaatattttgtgatatgtttcaggaatttcattacatgtttggttcaatttttaaagcatttctttttattatttaaaacttttagcattggtgaccatccatgtgctgcttttattgccagcttaacttgtttttatgacatcttcaggaagaaaacctctgctgtctatttaatggagatgaattgttaaacttttaccatttgcaactacacgtctctatgagtcagacttttattgatcgtgtacaactaaatgaaacccggaaatgaaggaaatgtaacaagcgattttatgtattttttgtttgctcaaattgcctttataaaatagattgatactctataataagcaaatgttgtgaatttggaattttcaaattgaggcttactaataatgttaactattttatccgagtttatttgggtttcttataaaatgtaatttctcaagaagattttgctgccctaaaaaaaaaaaaaagaaaaagaaaaagacaaaaagggaagccactggttgctaatggctcctgcggctctgacgatcctcgatgaagtgttctttgattaagtgtcaagatgagtggtgcagacctttgacagacacatgattgtggttggagaaagcccagcattaactgctgaccttgccatctgtgagcaggtgttgaatgagctcagttccctcccagcccttctttttccctggtgggtcattggctcctgagtaagatagatgcatgcaatagaagagctgttaatagcatttactctttcttaatccttattaatcccattcatatttcagtgtctgaaacttggcaggatgtcaagaagccacagtgcaagtagggaaattgaacagcaaggaccaagtacaatgttcccctgatatttaatttgctaaaacatgtaagaagaagaaagttcttacattgttaggtcccaaagagagtgccactaagcaaccttgccaaaaccaccttgctggagcttcttattatctttttttagcgaatggcaataaagtcattttgtcaagctaaccaagtaccataatgagatctttgtggcataaattaaccgagtggggaaataactttgacaggggttgatgtccgaaatgaagtgttgtttgtctgatgtcaagcctgtggggaatttgaaccttgcactctttcctgataagacattaacctctgcatgggcttgctggcccaaccttttgattaactggacctattttcttgtagatctaatacaaggatttggagaaccccagtaaaatgctggagggacttagactctgatctctattgggatgtgtcaaattggagatttggtgggcttttctgctgtgtttactgcgatgggtgtgtgtatttgaagtctgtatgtggcctttaaggatgtgtttggggcgcagaagttctgggtaacagagaggctctcaaacgttagattttggattagactttgggtcaacttcagggtagcaagaggatggatacccgagaacatgttttctccgacttcctggcccctgtcttctaagttctgggtagtgatgggtctttggaggggcagccctttctgccatgtgaatctttgcccagccctgagggggtgagggctggccaagggagccgggccatggtcggagagaaggctgaggctccttgagaagcatttggagtttgagtcagttgtgtcttttaaaaaaattacccattttggacttgcctgtggaagcaattagagagatcacaggaccgtttctgattcccaattctgtccagtgtctattcagaaaaatagaaaacagtcaactggaacaggggattatttgagcacacacagagtcctgttgtctcagcagcgtgccctcagacaatttgccttttagtgaagtttaagcccatgaaaggaaataaaaagtgttttattagatggcaaagaaagatggactggacttatgagactttgagaatttttgctttttctttgttaatgcaaactttggaagagagcaactctttctgtaatgcaatttatttgtacaatgtggtagttattgttaatagctaataatgatcttcaactgggtaaaataccattgtgtgtttgagagggagagagagagagaagggtaggaggagagggagaatatcttttgttcaaagccaaatgttgctacttctgaagacgagtgcaccttatgggtatagccagctataatgtttatcaaacatatactttttttttttttttttgagatggagtttttgctctgtcacccaggctggagtgcagtggcatgatctcagctcactgcaacctccacctcccaggttcaagtgatttctcctgcctcagcctccctcgtagctgggattgcaggtgcacgccaccacacccagctaatttttgtatttttagtagagacagggttttgccatgttggccaggctggtcttgaactcctgacctcaggtgatccacccacctcggcctctgaaagtgctgggattataggcatgagccaccatgccctgcctcaagcatctattttgtgcaagagcttgcagaagttctttcctgccacagccgtggttggccacattgctcccccatgaatatgtggaaactgacacttcaggagaattggtggctcacccatggcattcagctagtgggttatggggcagagactcaaactcagccctgactcccacagcattgttctttttctgtaaattgctgacttactcagttgatcacagttcattgccgtttacagaatttgtctgcacccattgtgccttttaagtgtcgattttctttcctgaaagcacacaaagcaaagcacggctctgcagtgtgacccaccgtgtgctgtgtggacagatgatgctggtcagcaggcaggaaaacgatctgccaggcgctgggggtggggcagaggattgttcttcctgaccttggtatgaaaaccgtatggagttcttagtgaggaaaatcactcttagcccaaattcctgcgaaggccgatgggattgtttttaagatttgttggattgctggatttgttgaagggagaactggaagaagctatcagaagtttacagggcatcggagggagacactccctttggccactttctccgccaaaactatcctggttttagcccaacagtttcccacgcccgcccccacccccacaaccttgtttgtttaaagaccattaaagaacgtcttcaatttattctggattgagttttcctcaaaccaaaccacccctcagttcaccccccagagctgttgaggcccttcctgggggcttgtggctgtggctgcctcagatcagagcagaccctgggctgcatcatccttccacattgtctctctaaagtacctgaagccagtagttctcaaactttggagagggttttgagtcacctcgagagctgataagaacagaggcccagattgaagttgaatagtgctgggcctttgtttttaccaagttccctggatggttctgctacctcctagcctgtgagaactactcctttgtgatttcttgccattgaaattttttctcaccttcttcttggcttgagtgctcttctgggttccttccggctgtccaaatcaaatttaattttcacacccagaccttgtccctgctctcatccttcagcccaccctcctgttccccattcagccagaccccctgccagtcagttcaagtgctaggcatggggtatcgagtctcaggccggtccacagacattccagcacctggtggtaagaggtgagtgctgcgtggacccactgaggaaggctctggctgtgctgggggaggggagtttatgctcgtcctcatagaaggataagcaggaattaagtgggcaaaggagggagtgaggaagctctcactttctaggtagtaggaccagcatgaaccaaggtaggggatgacaacatggctcattcagggaatttgaggtatgttgatacatggaaaaatgtacctgaaatgtgagtcctgcttttgtgactcaccctttcctttacataagcattgatttacatctgttgttttttaagatagtgtgtatgttgaaaagttcagaacaagatcaagtggagacataaaatggtaagatgtgaaaagttgttcttgccagattaaatggttccacctgaagaaaattttttttttttttgagatggagtctcactttgttgcatgggctggagtgtagtggcgtgatctcagctcactgcaacctccgcctcccgggttcaagcaattctcctgcctcagcctcccgagtagctgggactacaggtatacactgccaagcccggctaagtttttgtattttagtagagacggggtttcaccgtgttgccccaggctagtctcaaactcctgagctcaggcaatccccagcctcagccccccaaagtgctaggattacaggcatgagccaccgcacccggcctgaatttttttttgttttgtttatttatttcttggttttgctggcctttaagcaacccaagactagggggctttcactccgtccctagagagctcaaagggcctgacttaggggacacagtcagtgaaggggatgaatgaatgagtttcagatccaggtgttctggataagtcactttacctttctgggcctttttcctcaactccaaacagaggatgtcggtatagacaatccctaggatcttgtcccctttatgactgatcacacagttccactgcttgcccttgaggctttggtgtccgcgcatgcctattcagtctgacccacaagaggccaggccagctctgttccaggccctgaaaatcccattaaaactccactcactagcctgttccctgggggtgctgaatcagcatttaatggggaaggccacgagctaggctctggtgggtaggaagtgtgtgacttctcttacctcaacagtttctactgtaactagcgggataaggtaaatctatggaaatgcaaggcttatgccgaggctcacagagtgggccaggctgcataagtcctggacaccacagggcctgctttgagaaggcagctgtggtcccacagccttgaccaccaggcaccatcctctgttgccagtggacccacatttcaaatcattttatctctttttttttttttttttttttgagacggagtttcgctctgtcgcccaggctggagtgcagtggcgcgatctcgactcactgcaagctccgcctcccgggttcacgccattctcctgcctcagcctcctgtgtagctgggactacaggcacgcgccaccatgcccggctaatttttgtatttttagtagagacggggtttcaccgtgttagccaggatggtcccgatctcctgacctcgtgatccgcccgtctcggcctcccaaagtgctgggattacaggcgtgagccaccgcgcccggcctttatctcttaaataacctgtattcatttgttccttcccatgtcttatccaccaaaaatctccaattggaaattcagacaaggattgagaccctgtgttcttaaattgggttgattgaaatctagaaacaatgatagtaataacagagttatcttctctcgaacatctgcctcctgcctgatgttatttcgcttaattctctcaagggcttgaggagagtcctgccataatccttcctttcagaggggaagatcgaaatttagctcagatctcaagctagtaatcatcagaaccaggatatagaatcaggactagaccacatggtccctgctctgagctgctgcgggtccatccctgtggctctgtccagggtaaatggatgattcaggggaagggtcagcaaactatagcccatgggccaaatgcagccactgcttgtttttgggtggcccaagagccaagaatagtttccacatttttaaatgggtggagaaaacaaaatctacaaagaataatgtttcatgacacatgaaaattatgtaaaatatacatttaacgcttgtaagtaaagttctgttggaactcagctacagtcgttagtttacatatcatcgatggctggtttcgcagtacaagggcacagtttaaagcctgccaggcctaaaatgtttactgtctggcctattacagaagacgtttgctgacccctgatttagggcattcatgaggcttgatgagatgttgaaaatcagctgtctcctcccgtcactctcttctgattgtgggtaggctctggtgcaccagctctccagtgatctcctatctgatgctcagagttctttttccattgcatggatgtcaaataaaagtgtctgctttgtggcatttctggcttgagagtacctgcccaatgtgatttgccaaggtgccattttatcaaaagtcttaggatgactggatgggtttgccttgaatttgttttgcctttgctgatggttgtatttaggttatcattgaaagaggattgcagaacagcggcagtttcctgtgctgtctggattgaagttgaataatgccctaacttttaattgaaagggactgttgtaggcgggagactgtctaagagctgacctgtcaccaccacctgagatgtctgagcccacccttggactttcttggcacgtggggaagagggggcctgggtcctgggctcccacctaaactcagcagaccccactggcaggtgtgtgttgtgggggtgatggaggctttttggagggcattgagctccttgggtggaggtggggtggctgccttgggggctcagtgcagctctggccatgatggacagaaggagacaagaatgtagcttcttgttctgagaacttcagcccaagttcctcctttcatgcagcagaatccaagacactgacttgcccctctctgctgttgaggcttctgtgttgcagagataccttctggccctgctttatcctagtgaggcagctcacctctcccgtgtttcactgctcgaactctccttcccaaggctgtgctagtggtagtgatgacaataatagctactatttattgtgtgcccctcgtatgctaagtgcttcacgtagattatataatttaatacttgtcacaacagtcttatgaggtaaatactgtatatatatttaaaaagactatttttagagcagttttaggttcacagcaaaatgtagaggaagtttcacagagatatcccaagcaccccttgccattttctcttagttatgaaaatgatcaaatgggctgggtgtggtcccagcactttgggaggccaaggcgggtggatcaccggaggtcaggagtttgagaccagcctagccaacatggtgaaaccctgtctctactaaatacaaaaaattagctgggtgtagtggcacatgcctataatcccagctatttgggaggctgaggcaggagaattgtttgaacctgggaggtggaggttgcagtgagccgagattgcgccattgcactacagcctaggcaacaagagcaaaactctgtctcaaaaagaaaaaaaaaaaaaaaaagatcaaatagacttccaagtgcccatgtctcaggttcagtactgatcagcattttaccctcctttgcttcagctccctcctgtcattgctcattgctgagagtgggtaaggggctttctcaggttcctgtagctggtaggatcccgctgtcctcaaagttcctgcactcagtggctgacggtgccaggtgactcccccttttggggtccatgacatttgctgctgtttctaaagcccctactgtgtgctgctaatcccctcaccaagcttgcagagcggatggtaactgacaggtgaaaaaatgcaagaagttaggtcacgggtccggggacatcctgctaataggtggtggtgccaggcttcaaactcaggcctgacttcaagtcccgcagcttctctgccccaccctgtctctgtcctcctcacctctgtagtgtggtgggactcggtggggtggtcgtttgactgtgggaacttctgtttgcaaagccttggaaggacccaggtgactgcagatagttccgtgagaagcatctgggactgttgacctcactgctgatcttccttgtgagcctgtgatagggctaacccttggctttctggccagagtgtagacagagacccgattagcattttgtggtcagtcagaggcagtttgtgaacctggaacttggaagctggtttcctcctctgggagggatgtggagcctggggagccaggaaggcatggactgaatatacacccagctgggcagtggggaagggaggattccgtggggagctagccctgaacacagcaagcatttggtaaatggtgcctgttagctgtttttatccgtattctaaggtggacgagcggcgcaggagagaactggtaggattaatggagtggtttcattattcagatttaagtgcatgcagccagaagtcttcaactgaagaattgaaactctctgctcttttttgggggtcatggtggcagtgtgaggggctggttcatgagtgaggagaaaaggtagtggcaggcagaatggtacattttatattcatattgtgcacattattcacacctgacatgggccagaaatcctctcctaagagagacacttggaaagtaaacagtttgttaatcatttcaacccgtggactttggttgcagggtgcattttgatcaagggttacaaacaccaatgtcttcagggacatttggggacataaataaagggaatggacaaaaagatggaaaagcatactgcctctcagtctttcgcatgctcatgtttgatagagaaaatcaacatcgtgggggcagtgttgcttggcaactgccatttgtcctcagcgttggggtgacattactagggaatggctgtgaactccaagcacttccccccgggaagcgaggctgacactcagatccaattcatgtctttaatgtggccaaatgagaaagccagatgtatttctgagaagccaaaaaacaagatttaaaaaatgctatctccctaatttttttttttgagacagagttttgctcttgttgcccaggctggaggacagtggtgcgatcttggctcactgcaacctctgcctcccaggttcaagcgattctcctgcgtcagcctcccgagtagctaggattacaggccaccatgcccagctaatttttgtatatatatttttttcagtagagacggggtttcaccatgttacaggccaggctggtcttgaactcccttgaactcaggtgatccacctgcctcagcctctaaaagtgctgggattacaagtgtgagccactgcacctggcttctatctccctaatttttaaatacttaagattttaagaaacatcacaggtcaagcaatgcatggcagtgggctagattcagacaggggagcctcaatttaggacccccagatttatcatacaaggtggaggaagggttcagatagggacttggggattgccaactctgaccctctcttcagatgaagagattagccctgtggaggagtccaggatttgtattttagtcttggtactgggtgttctgggttgagttgctagaccattctgggacaagttgctagaccattctgggacttactttcttcctccataaagtcaaagggtaggtagatcacacatttttaaagtgtgctccttgaggtgtgtcaggggttccataagcatttgctttcagttttattaaaagcagcctgtactctcaaatttgagtatatttgaaattgtaatgagagcagttgctcaggatggagtgtggtggctcatgcctgccccacactttggaaacctgaggtggaggaaaccttcaggccaggagtttgagaccagccagggaagtatagggagaccccatttctacaaaaaacaaaaatattagctgggtatagtgggacacatgtgtagtttgaactactcggaaggctgaggctgggggatcgcttgagcccaggagtttaaggctgcagtgagctatgattgtgccattgtactctggcctgggccacagagtgagatcctgtctcaaaaaaacaaaaaacaaaacaaaaacaaattaaaaaacaaaacaaaccaaaaaaaccaaccaacacatttgcccaaatagtgaatcacatcaaattttaaaattcgctggaaactatctgcttcttaatttgattatacatcaattatgttcaaagtaaaaaacaaggtaatttgaaacagctgcttttatccaggtgtatacacggtgtatacatacacagatatgtatgaaatgtggaactctatacccgtatgtatggagttcctcctaagagtctttttgagaaaatagttccattgctaaaaatacccaatggaaacttctggcctgggatttccaagttcaccctcggctgtgcgtctcaaagtccacacagcctcaccaaaatagcccttctgggtacttttttctgtgtgttcttggaggaggccatcgtgcctccagctccctaaggcggaagatgagccagcggggatctttgcagggtggttggttctcgttccttccaccgaagccttccatggcatttttgggacctggaattgtgaattattctgcctcttccccacagtccctgatgacagcatgaagttcagagagtttatttgcagatgaggcagggaagccggcctgttctcatcttgctgtgcctgatgccttgtgcttggggcactgttcactgtgctgcctgctggcctgcttgtctctgccttttggatgggagataggccaccccacagtgccacacctgccttcagggaagcttttgggtgttccttgtctggcttctgggttcagtgggagggcccacccagcctgtcattttaatgatttaccttagaggagccagttttatagggagttgttggataatcttcacaaggcagataaatgggagagcaggaagaatgatggcctttcagagttgaaatctgtgctgctccaaatcccataaactgctatttgattttaaacattgcttgaagcggttcacattttggttaattacgtcagtgggtaaaaataactattgtcatatggtgtgtgggcttggctttagaaggataaagagtctattgttacccattgtgctattcagtcacttattacccatccttaaaagcccaacgtggataacagaaaacctggagagctttgtcacttgctgaaatccaagctgccctgtgaatttatccccaaacactgctccttttgagaaacttgtacaagctgccttaatttagtcaattcaaatgggttgatgggggctgttcccaaggcccaggacaggcaggggtttgtgacctgcagccctggaactgcctttgggtttcatggtctcagttgagacctgcccagggttgaaccagcttagtgctccctgggggtggttaagttcaaggacttcagggtccgattgaccttgggctgaatcttgacctggggctgtaagatgctcggtcaggaccttaacttttccaaggctcggtgtctacatctggaaaatggggataaacacagttcctccctgctgggattattgtaaggcttgaatgagatgataaatacaacatctgacttgcgactggacggtagcaaagggtttagttaatattataataagtagaatggaacagcattagattctcacacagggtcactatgttgttttctcccattctacccctgcatattaccctgaagcacccccaagcctctccctccccatccctcaagcccctccctccccatcccccaagctcaccaggtcctggcgcacccagatctttcactgcttttcttgcctgtgagctcttggggagtcaggaccaccttaagcaccctctgcatctttggcacctaacctggggcctggggccctgcagggccacaattagcagcatggacaacagcatggacggagagggtctcagagcctggagagctcctaggggctggagcagtcacaggaagtcaccaagtgaattgaagggtggtggctttggaggttcagtgaggcaagaagaaggctgttaggctgggaattaaggaaccttgtgttgttcgagtctcaggacaactcagatatggggtctgtattgcaaatgcccctgcgtcattttacaactgatgaaaacaatggctccacgagaccctcaagtgccagagctcatgagtgacagtggaagttgaactaaccttttaaccaccctagtccacacctgtcaggctgacgggctttcagtggtgatgtgttgggagctctgtgccgcagatctctgtgtgctcctgagactctgcccgcctgtctctaccctgctgtgcccactaggaggaggctgacctttatgttctacaccagtgggtgcccttggtctccagcttccagtgggccagtctggcgagagaccctagctggagatgaggggaggtagccttggcctctctccttgcccttcctcgctgctgctaccccaggattcttgcccatcccttactggttttccttaaccccaccctcacccttgaaaacagactctttaaaactctcctcactcaccctcattgagtgtgtcatctgctccagctaggatattggctaataccgcatgtttcagaaagaaaaattcgcagttctatttatttttttactgtggattgaagggagaggcaaccaggtatatggatgaaggagtagggcctggctgtcaccactggtgttcacaaaaggctcccgtttaagtcctcttatattccaaatgaggggttataggtcgagtcagggcgttgctctaacagaagcaaaaccaaaaatacacggccgtagatacaaccctgttctggtacttcctaattttgtgtgtacatgtgtgcacctggagcttcaagaaatgaaaatggaaatggcctgagtgtttctcagccctaggatgaggctgtttctgtgatttagggctggaggttatgaagacttggtttacaatatgcacagtacagaagcggggaagtcaaggtgtgctgggcaaggaaacatctttatgtgacccacaaagagtgaagcagagggaagaaccagaagttattctggtttgcagactgggagacaggtttaatgacacagtcatgtcagagagaggggaagaggagaatacgtagggggtctgttttgatgtgtatgtacatgtaggattttcatgtagaggagttggggaaaattttagaagttttaggtgtaaatgcagctggtaagatccttatgacttagtttcttttttttcttcttttcttttctttctttctttctttttttttttttttttttttttaagacagagtctcactctgttgcccaggctggagtgcagtggcgcgatctcagctcactgcaacctccgtctccccagttcaagcaattctcctgcctcagcctcccagagtgctgggattacaggtgcatgcaaccacacctggctaatttttgtatttttagtagagttggggtttcaccatgttggccaggctggtctggaactcctgacctcaggtgatccacctgccttggcctcacaaagtgctgggattacaagtgtgagccactgctcccggccttagtttttgagtgggaagaatctagtgttcagagtggaccactgatgtcatagctgcaggtttggctgaattgggatggtgcagaaagccgtgttaaccatttctttttctctgaggcctggaggaggatccttgtgactggaaccacagttgggactggcagtggtttttcctgctggcaaggaaaaaaaaaaagagaaaagaaagagttcgacttatcagcacaaagaaaggaggatgtgaaactagaaccatctctagggcagttctagcaatgaacaaggctggaaggctcaccggcgaggggtttcccctcaggaaaggggacagagaagcttccacctcctgggtagcattgggtgttcctgggcacatctgggtgactaacgggttttctgccacacaactggggtatatagggaagtctttggccagaactgtgggccgtactgcattcttcccgtgtctgtcactgctgagtcgtgagcttgatctcttttcttagtgtttgctccttttgtccagctatgggggccagcagaagctttgggtcatctgtaccagtgactttgctgtgaagatgtaagggagagtggttgaggtcaagatctgggttctggttcttgtgcctcctctctggctgtgtgtccttcaacaagctgcttactgtctctgggcctccgtgccctctgcaactgggttgttggtctatttaaatacttggagaaaaaagctgggcatggtggctcatgcctgtaatcccagcactttgggaagccaaggtgggaggattgcttgagcccaggagcttctgaccaatctgggcaacaaagtgagatgctgtccccatacagaaataaaaaaattagctgggcatggtggtgcatgcctgtagtcccagctacttgggaggcttaggtgagaggatcgcttgagcatgtgggatcaaggatgcagtgagctgtgattgcaccactgcactccagcctgtgacagagtgagaccttgtctcttaagaaaaaagttattcaaaaaatactttggaaaacaatgctggggagagtatgagcttcagattgcacattggtttctatcaggaggatctgagcctcggtggtgttacctgtaaaatggggataaaaatacctcacagggttgcagtgaagatgtaaggatgatgatgatgacaacagcagctcaaatagatcatttaacttaattctcgccaaagcaaggcaggtacaaagatcatcctgttggcagatacagacagggagggacagagaggttaattaagcaagctacctgcccgcagttacatggccagaagcagtggcactgaacgacttccttcaggcggtctgagtccaggtctcagctcttagccatcactccatggttctgtgctgagacaagggatgtagaaagcccagcacagtgtctgttacatagtaggtgcttagtaagttagagttcctttttatcctcagaatgcgtttgcaagtatagcctcccacagtgcttttactttaatctttccccttactgggcaaaaaaatgtttgctgccctgtgcgacttgcctagctattgacttctcttttttctgcctctctcctatgatccatcctagactgtggattgaggctcagcctagattaaagggcaggggctggaggaggaagatgagctgaaaaagggtaggcctgaggcgcgaaggagttgatggtagggtggaaggtgggaatgggaagtttgagaattggaggacctgggggcaagactttccccctctgggctcgttctttccttcctgtgccgtttattgagtgcctactgggtccaccattctaggcatggggcacagacaagatctctgttctcatggagcacacagtgtggttggaggagtcagtgatggacagagagtgaggggtgttggtttccatggctgctcggagaaggacttgctgaggaggtggcgttttgggcaggccatgaaaaggtctgggcagagtgtgtttgtgggagggaataaatatgtaaaggctctaggggagaatcagtttcgagaatgtgagggggcagtgagaccagaggggctagtgggctgtggctgagtttgaattttattctaagtgtcatggaaagtaggaggacggttttttccaccagggtcctttttgattattttattcttcgtgacgatcctacttaaaaaaaaaaatcttattcaccaaaaaggtgtgtttgtgaaacaatagagtgtacaaccttgaatcactttagatttttaaagtatagggaaacaattatggatcacaatgaatatccttgagggctgctcccctccccagctgacactgtcagctaaacctttaaggcctcttgtgtgtcaagcattaattcttcccaaagctgcttgacatgtgattaaaaatttttactgccacctactgatggaaagaagaagatgaatttttgtacaatgaaaatcccaaacacagtggatttctggtttccactgtgctgtcaggactgggaaatgggtctggggaaggggtgtgctgggcttggtatcccccccacccaaccccctttttttggccctgacaatctggtctctgcttctgtgtccttctgcttcagctcatcgcacagtgggtggagggaggtgctgacctggggagttgctccggggagagggctggaggtggggggatgtgtctggggagaaacactgggcactgggagtcagcagccgccagcccccacataacccagttaatcctttgtaattgaccccgaggttgcaatgattccctgtgtttaatgtcccaagacggcctaaccctgaccagcagacctttgcttaatgtgcttcttaccaccccacccccattattaaatcctcaactgctttatttctgatttgcattttccatggctgaatgaatctgctgacttccgttttctttttctgtttcagatcctgtgcgcaggtggcagtgagtacccttttcctctctattcttgtgttgttcgctactgccccctaatggacacacagcaacattaacagcaatgtgaaatgctaatttattaaaacctgctcggtttccaatttttctttttctttttcttttctttttttttgagttggagcctcgctctgtagcccaggctggagtgcagtggtgccatctcggctcactgcaacctccgcctcccgggttcaagtgattctcctgcctcagcctagcaagtagctgggattacaggcacgtgccaccatgtccggctaattttttgtatttttagtagagacggggcttccccatgttggtcttgaactcctgacctcaggtgatccgcccgccttggcctcccaaagcgctgggattacaggcgcgagccaccacgcccggccccaatttttctttagaagtaggagtgagggtggaaacaacaaatgaaagaaaaaattttaattaattgtgcaatcatgatgaaaatttatattttctgtaatttttttctagcctcatctgtgggcgatttaacttagttgaaattgtaatacattatttgtatattgtttatgtgctgttatcctttaagtattttcttgtgttgctacattgcccttttgttgctacattgctacatttaaagaatggggtggaagatcgtcataacctttggaaaatgagacctggactcccgcatgttttgctttcatgcacagggctgagtcccaactgctgacagtgctggttcattccctggtaataaaatgagaaaaataaggatatgactagaagttttttaaggaagcttaaatatattcagttgaaagcaccatccatccctggattatgtccttactaattttttggtcataaaacatttctataagaattgaaggccgggcctggtggctcatgcctgtaatcccagcactttgggaggctgaggcaggtggatcacctgaattcaggagttcgagaacagcttggccaacatggtgaaacaccatctgtactaaaaataccaaaaaaattagccaggtgtggtggcatgcacctgtaatcccagctacttgggaggctgaggcaggagaatcgcttgagcctgagaggtggaggctgcagtgagccgagatcactccattgcactccagcctgggcaacaagagtgaaactccatctcaaaaaaaaaaaaaaaaaaaaaaaattaaaaataatagtagttggtagttttttaaaaaatgtaccttttaggaaaaaaaaaaaaaaccatggtttttgtttctccccaaaatttgggaactttttttttcctgattggtaaaatctcagtttgtgagataaaataattagattgtactcatggaagcatatatgggcagatcttgctgaaatcttctaataaagcaaatctcaattaataatggtaattagagcctgtgcaaacaatgggaagagtactgccgttggtttttcttcctgttaattagtttaataaataaactggtgggtaccttgtacaggcttgaatcactgctgcagaagaacacttctattcaaacatctaccgtaggtagtagaattgcgggaaacagaaatcatgagctattttaactgaaaggatttaccctgggaagtgagagtttacagagtcattggaagggccgctgtattagtttgccagggctgctgtaataagatcaaggtcttgggggttaggacttcaacatatgaatttgggggtggcggagcacaagtcagctcataacagctggggaggaggctttaggcctggccctgagaaattactcccagactaaggctgcagaactgaccccctagagagtcaccaccttggtcatagacagcaagcagagagggaggaatcaggaagtccctgctgtagttgctggatccagcggtgaatgttctgagctgtgatcctgggatcaggaagctgcagccactgccacagtgttggttctagagccaggcagcatgagatccagtcatcgcatccacactacagctataagaaggaggaagggcagaaggttgtgctccaccctttaaggacacttgctagaagtcagacagaacgtctggtcacactctgtttgacagaagttagtcacatgcaacatctagctgcatgggaggctgggaaatgtggtctttgttcccaacagctatgcatatacagggccaaaaatctccaggagtatgatgaagggaaaatgggggaatggagtttgggggtcaagagtggtctctgctgcacctccctgaacagagactctaggagactagtaatgaattcaagataaagcagccagtgtggccaaggttctccttcagtgcctgagctcttggccataggagctcacgcctcctctcctttcctgtgaatgactgtgtgcagtgtaagcatggagcttctgcactctcgtggccaggtactctccatgtggccagaaatggcagtttctgaggggctcatgttgtaggtgatgatacaaagaagagaaagagagggatcagtttttccaagtgtgcatttcatttcagtgtaaatattttgtgaggtggggcatccctgtctcctggagaaatatatttttaatctaattgtttactttctttgcatagcccctagtccaattcctgacccttcagtagcaactgttgccacaggggaaaatggcataacgcagatcagcagtacagcagaatcctttcataaacagaatggaactggaacacctcaggtggaaacaaacaccagtgaggatggtgaaagctctggagccaacgatagtttaagaacacctgaacaaggatctaatgggactgatggggcatctcaaaaaactcccagtagcactggtaagcataggcttttctgccagtcatgtttcttaaaggaaatcggtagaatttataaatgtcatgttttccaaatactgttcttcttttaattacctaagaaaatctttttaaaaatttttataaagatagtaatgcatattcattatataaaacatagacaagaaaagaataacaagtaaatcattaactggagataaccattgatcacttgatatacgagttttataattttaagatatatgcatgcctgtgtgcatatgtatatacatatatatgttttattttgttttacaaatatcaaggtcatcctttacatgtagcttctcaccaatatattacaaatattcttccctgttagtatatacatttctacaggacagttttaatacctgcctggcattctattttctaaatcagggttggcagataataatggtccttgggccaaatatagatcactttctgtttttgtaagtaaagttttattgagtctgcctatggctgctttcatgctagaattgagtagtggcaatggagaatttgtggcttgtaaagcctgaaatatttattctgtggcccttacagaaaaacattgctgatacctgggttagataattgattctaaaactgtggttcagagatctctaggggtctcctagattctttcaaggtatttctgggtattgttttcataatactactaacatgttatttggcttctttactctcattttatcatgagtgtacagtggagtcttgcagattctatatgatttgggatgacactgtcactcttacagctaatggaatgtatgctttcatattgtttaaaaaactttatcttttttatttctaatacagtatggtaaatattaatcaatataacccatataaacaaaaattctccgggagccttaataatttttaagaagttaaaagggccctgagaccacagtgtttaagaattacttgtctaaaagcattgtaaattatttaactgctcccctgttgttgggaaggtagattatttatttataatttttcataaaaaacattgtgatacaatagttttgttagttctagaagtattgataaaatcacatacacagttaaaataagtcattgaattatttctagggtaatatgagaaacttttagaaattcctaaggggctgggcacagtggctcatgcctgtaatcacagcactttgggaggctaaggtgggtgatcacctgaggtcaggagttcaaggccagcctggccaacatggcaaaaccccgtctctgttaaaaatacaaaaattagccgggtgtggtcatgcatgcctgtaatcccagctactcgggaggctgaggcaggagaattgcttgaacccaggaggcagaggttgcagtgagtggagatggtgccactgcactcccgacagagtgagactctgtctcaaaaaaaaaaaaaaaaaaaaaaaaaaaaagaaaaattcctagcaagcttatgttaattattgttacaaaaatttgggcttagaggttgggaccataccagatggtcttcccagaaatcactggacaggcttactgttgaagggcatttccagaggaagccaatctacaatgattggaataagaacctacttcttcaaatatacagacatcaacacagagtcacaaggatcaagaataatcagggaaacgtgatattaccagagaaacaaaataaagtgcaagtggttgaccataaagagatgggagatgtatgaactgtctgacagagaattcaaaatacatgttttaaggaagcctagcaaactttaagaaaatacagataaagaattcaaagaaatgaggaaaacaataagtgactagattgagatatttaacagagaagcaaacagaaattctgaagctaaaaaatactttgaacaaaatgaaaaatgtaatagagagcaccaagagtagaactgatcaagtagaagaaataatccttgaacttgaagacagattatttgaaaatatacagaggaggaaaaataaaaaagtggataaaaaggaatgaagaatgcctataggatttatgcaacagcatcaaaagacgtggtatttgaattggagttcatctaggggaagagaaagataaagaggtagaaagcttatttaaagaaatagtagcagaaaactctccaaacctggagaaagatataaatatccaggtacaggaaggacaaatgactccaatcagagtcaattcaaacaagactactccagaacataatcacactgtcaaacatcacagacaatggggatttggaaagcaaaaagagaaaagaagcaaataacatgtaagggagctccacttcagctagcagcagacttctcagcagaaacttacaggccaggagagagtgggatgatatattcaccatgctgagggaaaacaacctgccaaccaagattgctatacccagcagaactggccatcaaaaatgaaggcaagataaaagactttaccagagaaacaaaagctgagggagttcatcaccactagacatgtcttataagaaatgctaaagagagtttttaagctgaaagaaaaggacactagtgattaattgaaaacatatgaaaggataagactagtaaaataaatacacagtcaaattcagaatacatgaatactgtaatggtcatacatatctttaatatgaaagttaaaagataatacttaaaaaataataactacaataacttgcaggggggatatgcaatataaaaagatgtaaatggtgacataaacaattcataatatgagtggggaatggactagaagtgtagaggtcaatttgtgtgtgtgatcaaagttgtcatcagcataaaataacctgttataactataagattctttttataagcctcatggtaaccacaaagaagaacctttagtagatacacaaaaaataaaaagcaaggaatcaaaacatactactagagaatatcacttaacctcaaaggaagatagtaagagaggacggaaggaacaaagagtctataaaacaaccaaatggcagtagtaagttcttacctatcaataataaccttgaaagtaaagggtttaaattctccaatcaaaagacatagagtgcgtgaatgggttaaaaaaaaaaaccgatctcaatagtatgctgtctacaagagactcacctcacctgcaaggacatgcctagactgaaagtgaagggatggaaaaagatactccatgctaatggaaatctaaagagtggcaggagtagctatacttatgtcagataaaatagactttaagttcaaaacttttaatggagacaacaaacatcattttataatgataaagggatcaattcatcaagaggtcttaacaattataaatatatatgcacccagcattggaatgcctaaatatataaagcaaatattaatggatctgaatggacagattgactgcaatgcattcatagtagaggacttccaccaccttacttccagcaatggacaatgatccagacaggaaatcaataaggaagcatcagacttaaactacagtttagaccaaatggatgtatcagacatatacagaacattccatccaacagctgtagaatacacacttttcaactgcacctggaacattctccaggtagatcatatgttagaccacaaaacaagtgttaacagatttaagaagtgtgaaatcatatcaagtatcttttctgatgatggcatcaaactagaaataaataacaggaggaacttaagaaaattcacagatatatggaaattaaacaacatgctcctgaataactaatgggttgatgatgaaattaaaagggaaactaaaaaatatcttgagacaaacatcacttcttaagcaattttgttaacatatttctttttcttctttaaaatggtgccataacctccttcatgaaattgctgtgagacataaattagaaaatgcttgtacagcccctggtataggatctgtccccaggtcacttacagcaggtccccagcaggggtcatgctgatcttgccatctcccacagtaactattgttaattgttttgtcacaaatgcccctgaacaatcaatgggtcagtgaagaaattaaaagggacatttaaaaatttcttgaagcaaatgaaaatggaaacacaatatactaaagcctatgggatacaccaaaagcagcccttccaagaaagttgacagcaataaactcctacatcaaaaaagaaagctccctgggcacagtggctcgtgcctgtaatcccagaactttgggaggccgagatgggcggatcacttgaggtcaggagttcgagaccagcctggccaacatggtgaaaccccgtctctactaaaaatacaaaaattagctgggtgtagtgacacacacctgtaatcccagctactaggaaggctgaggcaggagaattgcttgaacccagagggcagagattgcagtgagccgagatcgcaccactgcactccagcctgggcaacagagcaagattctgtctcaaaaaaaaaaaaaaaaaaaaaaaaaaaaaaaaaaagcaagctcatacctccagcctgggttttgagagcctgtctgaaaaaaacaaaacaaaaccctcaagtaaataacctaatgtagcacgttaaggaactagaaaaataagaacaaactaatcttcaaattagtaaaaggaacaaaataataaaggtcaaagctgaaataaatgaaataggcactagaaaaacaatagaaaagatcaataaactaagttgtttttttgaaaacaaagaacattgacaaagctttagctagactaagaaaaaagagacgctactcaaataagaaaatcagaaatgagacattataaactgataccacagaaatacaaaggaacaattatgaacaattatatgccaacaaattggataacctagaagaaatggataaattccttgccatataccatttactatgattgaattatgaagaaatagaaaatctgaataatccaataatgagttaggagattgaatcagtaatagaccatctcccatttctatttattactgttgttattctaagagacagtgactccctctgtcacccaggctggagtacagtggtgtgatcatagatcactgtaagttgaactcctgggctgaaatgatccttctgccttagcctctcaagtagctgtggctattggtgtgcaccactacatccagctaacttttaaaatttttttgtagagatggggtctcactgtgttgcccaggctgctcttgaactcccagcctcaagtgacccccaccaccttggcctcccgaagtgctgagattacaggtgtgagccacccagtcctctgccaaacctttaaagaagatctaatgacagttcttctcaattgcttccaaaaattgaggaggagagaatacttccaaactcatttaacaagagcagtattaccttgatacgaaaaccagacaaggatacaacccaaaacactataggccaagatgcaaaaatctttaaccaaatactagcaaacctaatttaacagcatattaaagagatcattcaccatgatcaactgggattcttcctagaaatacaaaaagggttcaacctgtgcaaaacaataaatgtgctacaccatattaacagaatggaggacagaaaccatacaatcatttcagtagatgcagaaaaaacatttgaccaaaaaatattgttaactgtgctttcttttctgaacttaagaacttgcttttccaaaaccttcccagaatccctgtatgaatcaacaaaatttagttcttaacacatttctccttctttaaaatggtgacattagctgggcatgatggtgtgtgcctttaatcccagctacttgggaggctgaggcaggagaatcgcctgaacccgggaggcagaggttgcagtgagccaagatcacgccactacactccagtctgggtgacgagcaagacttcgtctcaaaaaaaaaaaaaaaaaaaaaagaaataatggtgccatacctttctcatgaagttgttgtgaggcataaatgagaacatacttgtacagcatctgggacatggacggcctctcaaaaggagtgctgctgttcttgctacctgcaccactgtaactgatgttgtttcatcatcctcgtcaccatcattgttattgattgtaaatggaagcacagtggtcatcttccaaatatgccactctgactctgtgaacttgtcactttataaagaggaaattcaagcttggaggggccttctggcatgacgtttattgaattgtggggcacaagatgcttccctgcttgttccattttcctttctcttgtttattctcctgccttatttatttattttttcttttgagacagagtcttgctctgttgcccaggctggagtgcagtggtgtgatcttggttcactgcaaactctgcctcctgggttcaagtgattctcctgcctcagcttcccgagtagctgggatcacaggtggctgccaccatgcccaattaatttttgtatttttggtagagacggggtttcaccatgttggccaggctggtgtcgaactcctgacctcaagtgatctgatctgcctgcctcagcctcccaaagtgctgggattacaggcatgagccagtgtgcctggcttcctgcagtttttttattgattggatgaatgtttgtatatcccatgagccagatgaggcacactgtccatgcacatagcaagatggtaacacttacaccatctttactcttttgggattagtcccaagctccttgagaatgactgccgtatcacctgggttttactcttcggtttctggttgttactcctcagtcttcagctcaattaggatgcatccatttggtagttttacagttagtaaccctgatggcttccactggtttacgatcttgtacatctaagatgatgaaactaaggttcagagaggtgagatgactttgagtaaaattgcatggtgagcaactagcagaattggaccctgaaaccagatttctaatgtccaaatcttgtcccttgtttatcatatcatggtggttcaataataattcttcgtgtttagtgtggtgtactagagctatcaacagagaaacttgagactgagaggtttgaagggactaattctaggtcacacagctaatggatggagcaggtctttaatcccagatctgggttccaagaccagtccttttctctttacgctgctctgtccctgctatctttatgtcagaaaaccactgagcttccttctagatgtcagggtttggcaaaaaagttatcatgtgcttctgcgtcatgcagcgttttctgagaatggggagagggactcattttgcatctttgatctctcttttttattttgagatggagtctcggtcttgtcgcccaggctggagtgcagtggcgcgatcttggctcactgcaacctccacctcccgggttcaagtgattctactgcctcagcctcccgagtagctaggattacaggtgactgccaccacacccagctaatttttttttgttttttttgtttttttagtagaggtggggtttcaccatgttggccagggtggtcttgaactcctgacctcaggtgatccacccgccttgacctcctaaagtttggtctctttttgtatcagcttctatacagacttaaccccatttttaagtcacagccagcatggtcaacttctgtcagttttgcttctgttccaaaggcttctgttttactaacatacacacatacatgtatgcatatggatttaaataaattctggtgcagggaagtctaggaggcaaagagagataaaactctgtgattggaaagtcacttctggaaactagacatatagagcagacctcactcttacatttctttttgaagtgcaataattttttttttttttttaacaatatagggcccagtcctgtgtttgacattaaagctgtttccatcagtccaaccaatgtgatcttaacttggaaaagtaatgacacagctgcttctgagtacaagtatgtagtaaagcataagatggaaaatgagaagacaattactgttgtgcatcaaccatggtgtaacatcacaggcttacgtccagcgacttcatatgtattctccatcactccaggaataggcaatgagacttggggagatcccagagtcataaaagtcatcacaggtaagatgactggctcccagggatgatgacaaaccatttcttattatggtgtattctagggccttgtccgttcaagttgcctgttggaaagagaatggttttcataaactagaagaggagaaaaggtgctatgttgtttcaagcctgggatttctggtggccacatcattcagtattaaggccctatgtgttttgggaagttctaactacttctgtttggtttttaaaatcttttgttattgttggttaacacctacctttctgttaagactcaggagtagagacttccttaaaaacgcgtgtcttcatggtaattaccagccttttaagctcccaggaaattgatgctgtgtttatattcccaggagtttctgttgggcaggaaagtttggtgtattttataggggagtgtgtgtttcaaatgaaataagagtttgatgatatttaaattttaattcagatttgacagtttagattttgatttatcttagatgtcaataccgaagccatctattatagctgcaaacttagctttttttttaagctgaaaagaaccaaacattttaaaaaacaggtggagaaacttttttaaggtgaggagaaccaaaaattgaagaaagaggtcctctgttagttttctgatctagggggctggggagtgtgatctcaggggctggagtcggccatgggcgcctgagctcttggagcccacggctggaggtgaacgaggtccagcgtggagcagcaaatatgaaaccagtggcttccgacattttaagtcaggaaactatttctttaaacaaaaccttgcccaggagcccaaaaagtaaaaataaaaaactggagagaaaagagccaaagaaatgggagtcacgggcaccctgacaaaactcctggagctcctcagagcactattttaggggggaaaacctgccataaaggtttgctctgttacattgtgaaagagagggaaaggagagcacagagagatgacagaagagaagagaatgagagaaaagagcatagaacttggaaatggtcatgaggacaaggtgaccccgagggggtggctgtgggaaaggggatgcggaggtgcaggaagcaccggtagaggggctgagtgtccttatctagcttaaagccctgagcacagggctgcatgggagcaggtccatcagctgctgcgtattgagcacggcacatgtgcctctctgtccttaatgttattttgtcctcacagtaaccctgggggctgcagcagaagacactgtaatgtggagaagttaagtttcttccggtgtctcagagttactgagtatcaagtggtggggctggaacccggagtctaactctagaccactgtggtgcagtgatgttcataacagctatccacagtcaccgagctgggaatttattggttctgcattacttaataaaacaaaaagacgcatgactgacctgatttagaactctttgcatgagagacatgtgctgtgaagaatcatcttaccgtttcggagctggacggtgccttagaatcatctaggccgatgtctttaccttcaggcccctgcagccctcaggaggggttttgctctatctgcagcactacctgtgcttttctgtacatgaagctgcagccctgggttctcctgtccccactgctaccaggagtgtgtgttcttgagcaagcccccctgcctctctgggtcttcgtgttcttattggaaaagtgaggggagtgcatgtcattttgggtgaagtggtttgacttatgtcaccatcaaccaaataacgcgatgggaggaaggtccaggatatagtggagatggaacgtcttctgaaaaatccccttggtgctgggatattgaatgtgctgcttacttgaaatgtcttggtaatttaaaatgatattatttgcattatcttgaattgagacctttagattagtaaacagtcactttatttgaggctttgttcctgatatctaaaacacatacaattaaatgctaccatttaaaagggacagtttagaagagtgtccagtcactattggggttaatcttggagaacagtgtggatcctaaacaatttcagttttaaggtttttttcttctcttccgtgttattattttctcccccagccctgctgtgaaatgatggaaatgcattgggctctgatagaaaggaagtatttttagtgagtcacattgggacatcagtgacctcagtcattctttctttttttcttttaaaacccgctcccagcactgaaccccagtcattcttaatgaaggtgactgcatatatcttgttccattaatgcatgttgtatttttaaaatagagccgatcccagtttctgatctccgtgttgccctcacgggtgtgaggaaggctgctctctcctggagcaatggcaatggcactgcctcctgccgggttcttcttgaaagcattggaagccatgaggagttgactcaagactcaagacttcaggtcaatatctcgggcctgaagccaggggttcaatacaacatcaacccgtatcttctacaatcaaataagacaaagggagaccccttgggcacagaaggtggcttgggtgagttacaaagggtaccttccgtctcccttactggttcttactttcagtaactaaatgttctaaaaaataaattgctcttccatgtgtatggagatttagaatttataaagggcttttcctccacattttagtttgatcccccacctgcatgaggaaggaaggaaacgtgttctgattttacaggggaacacattggggctgagaacagcaataggaattgaaactttttagagtctggcacccaggaaagttagaggcccctttagctttctatctaacagctgtgtcaacccaagttgggccttcagaggaacttatcacgtctgctggttgatgttggcgttgtcatttgcaggtttcatagcatttgcagaggatccccaggataactccatgaggaggacaggcacttaatctgcattttatacttaagaaaacagagctacagagtgggtgtcaggatccttgcttgcgagtgacagaaaccagactttggatagctcagacagaaggaacaatttattggctcatgtggattttcctgctagcgggaggccttagagaaagagatgaggcaattctcatccctccctcttgcttctttctgttcatcagcttcattctcagagcagctccctctgcacacttaaggagcccagctgctcctgtttcacaccctgcagctgccccaccagccagctgccccaccaaccagggtctggtccagggaaacgtgtcttgagtggggtctgattagcaaagtctgcttcacagagctgtccctggaaatccatgctgggacaggagaagataacaacccaaagaagggagaatgacctgaaataagcagagtttgaaagagaagcaccagatatctgtggtgctactggaataacagtacaaatggagatggagctatcaggcctttttatggggctgcctctctctctggaggaggaagggagcagatattgatggagcaccaactgtggccactgtctgatggccatctgatggggttggggctccgaaggaaaatgggggatgtgtccctcttgtggttgatgtctttttgtctcctgtgcttgaaacagatgccagcaatacagagagaagccgggcagggagccccaccgcccctgtgcatgatgagtccctcgtgggacctgtggacccatcctccggccagcagtcccgagacacggaagtcctgcttgtcgggttagagcctggcacccgatacaatgccaccgtttattcccaagcagcgaatggcacagaaggacagccccaggccatagagttcaggacaagtaggttgaactttgtaaaatggtggcagccagagtttcctagcacaatgttctgtctcctgtgattctgattctgagtgatttcttgcataacagctagttttgatgtcagagggagcttcctggaggagattttggacagagcagatctgctcagtttcttcttaactccatgggcagtgcacatctctcattaagtgaaatcaaatacatggagcagcccctgtgtgcgggcaccaggcactgcctcacgccatctttcacagctttgcgtggtggctgatgagacaaactggcatcatactttcctcttaaaaacaaataatcattgcttgtttttcctttgctttgagttaagaaagttatgaaagtgagtttcattttttcacccgccttgtaattcataccgatctttctgttgaaatgcttgttgacatgcacattgctgcttcctcgctataatttatcagcactttcactctgtaagttcaccaatatttggaggctttggtgaaaagagcgggaggtgaacacatttgggaatacttagaggtagttactggccaggctgtgttacttgtacagggctagaagttttggcaagacattggtgagaagccattctgtaaggaatgacagtttttcctggtatccatgttgaaggagggtccatttgtgtccttccttccctttgtacttgttttgctaatgtgggagtgggtggggaggatgcggccgtaggacaggctgcctgacctcatggggcctgcagtgacctggcaggagtggcaggtgggaggctctcgggtgaggagggcttggattccagagggtgggttagttggaggaggaggaaggggctcctatgtgggtgcggttggcagtggtggggtgtcctgcacatggtaagcttgcgtgagagagtgaaaggggctgaaatctggtctgtgtgccctgcgtcaagccatgcacccagggctgggtccagccaggggaaggtccctttgactgatttgctaaaaggacttgtagatttgtgtgggcctggggtccctgctttttaaagcagtttgagcaaaagcaaagtagtagtgattacatctcaggctcttggtggtgtgaattcacacacatcctgctttgggttgaactgtcttcatgcttggtaaataatcattatagtagcctttccctctctataaggggcgagtgtgtgtgtatagataagtcttagtcagtttgggctgctgtaacaaatggccatgcactagatggcgtaaacaatgaacatttatttctcagggttctggaggctggaagtctgagactggggtgcagcatgcctgggctccgggtgaaacaccctcttcctcttccaggttgcagactccctgggtcttcacgtggttgaaggggtgagggcgtggtttctctccagcctttttgataagggcactaataccattcaggagggaggtaattcatgatctaattacctcccaaaagccccgcctcctaaaagcatcacatcaggggttacaatttcaacataggaattttatggggacagaaacattcagtctgttgcaacacacacacacacacacacacacacacacacacacacacacacagataaacacacatttccacccaccccagagcaccctgcacttttcaagtgactagttaggtggggcagggttaaggaaaccatcagaggacattgttgaggcacccaagacacgacagaaagccacctctagggctgaagggctagaggaggacagggtgtttctggagcccagtgagagctggggcagtggtggacacagctgtgtcaggacaggaggcccagagcaggaggtgatggaggaaggcactgactcctttctcctgtggcccttcaggggcctgcccattggctcatagtggaacccggtcacagcccatgtggcaagaccccccatgatgccttgcacaaggtcagcctcctgggcccagagcaggtgagggaagggcagtggatatgtcgggagggtggagtgggcaggtggtgaataactggcactcgggttatcttttcttgaggttaggattgctctccagttttataggtgaggaagctgagctcaagtggttttcctgtggcccacctgggtgtcatagcagagtgagccctggaacccaggcctgcctcgtcctgacttctgtgatctcgggcgatcacatagatcgcagtgttcgctcttgcatcatgtgtgtttgacaacttttctgggtgcccctggccctagggtaagacatgcatagagtccaagtcatcatttaggtcaaatctctaaagtcaacttacaaaaaggaacaaagaataaccctgcaggtgccattggccaggttgtttcttcaccgcccaatgatgcctgactttggctgggaccgtcatgctttcctagccacggttgatggtgcagaggaggaaggaacactcccccaggagagtttgctgggcttgacagcatgccctgatgacctctccctccctctgccttggccgttctggttattttgaactcctcttgtgttctcacagatgctattcaggtttttgacgtcaccgctgtgaacatcagtgccacaagcctgaccctgatctggaaagtcagcgataacgagtcgtcatctaactatacctacaagatacatgtggcgggggagacagattcttccaatctcaacgtcagtgagcctcgcgctgtcatccccggactccgctccagcaccttctacaacatcacagtgtgtcctgtcctaggtgacatcgagggcacgccgggcttcctccaagtgcacacccgtgagttcatgcctggctctcaccaccctttcctgctgtcctgctccgtgccaggcccagacacaggatgcatgatgtagtaatggtgactgttggctgaccacacgccaagcttcgtgtgacatgctttccttgcactggcacattgtatgctcacaacagccctgtgatgtggttggaagtagccttattttatagataggaagccaaggctgagagaggtgctagacaggtatcacagctggaaagtggcagaggtgagattaagcctctggtatttctcacctggagcctgcgcttgtaactctctttccagtgtggaggagacctagagtgaattgatacagggagacaaaaatgacctggtattcatatccccttgtgtcttgggtgctgacattataacgaatcactggcacagctgtatctcatctttgtttgtttaaatgtcccttaaaaataagattttatgcagcaaataaaaagctttaggtttcaaagaaggtccgataatgtaaaataaaacagtaatggtgcactagtagtacagtggtataatattgattatatactattaaacaatagtagtgacaccagcactgcattttgcactgtgccatgagatttatagacactgtagtggcctccgaggtaggtattggggtccccttttacagatgaggaaatgacaccctgatggctgaacagtttgcccaaagccacagagctagtgagtagcagagcaggacttgaactcaggggtgtgtggctctggacccaggcttatcccacaagaatgtccattccttcgcaggaagcacaccttagcattcttatagatgtattttggactggatctttgggaaaatgaaatatgcttgcatttctttaccttttactcttttactatttattagttaggattaggttcagccacgaataacaccaccaaaaacaacaacaacaaaacccaagtatccgtggcttaaacaagacaggggtttatttctctctcctgtaacagaagcccagtgctaggcaggatggggatgatagaggttatccaaggctcagttgtatgaaacagaaactgtgagctattttaaccaaaagggatttatcctgggaattgaggttttgcagaatcattggaagagctggtgtattagtttgctagggctaccagaacaagtaccaaaggctgtgtggcttgaacagaaatagactttctcatagttctggaggctgaaggtcaaagattaaggcaacggcaggtgtggtttcttctgaggcctccctcttggcttatagatgactgtcttctccctcacatggttgtccttagtctgcgtgtgcctatgccctcatctccctttataaggacaccagtcttgctggattagggcctaccttcatgacctcacattaacttaattacctctttgaagaccctgtctccaaagacagccacattctgaggtcttgggggttaggacataaacatacacatttgggggtgagggagcacaagtcagctcataacagttgaggagcaggctttaggcctcgccccaagaaatgactcctggactaagtctgcagaactgaccccctggagagtcaccaccttggtcacagacagcagagggaggaatcaggaagtctctgctgtagttgcgggatccaggggtctatgttctgagctgtgatcctgggatcaggaagctgcagccaccgctgaggttttggttctagagccaggcagcgtgagctccagtcattgcatccacactacaggtataagaaggaggaagggcagaaggttgtgccccacccttaaaggacacttcctagaagtcacccagtacctctgctcatgcttcgttgagcaaaacttagtcacattgcaacatctagctccatgggagctgggaaatgtggtctttgtttccaacaggtatgcacacacagggctaaaaatctgggtgggtatgatgaagggaaaatgggggaatggattttgggggtcaagactggtctctctctgctgtccctccctgaacagaggctctgggaggctagtaatgcattcgagataaagcagccagtgtggccaaggttctcctccagagcctgagcccttgaccacaggagctcacgcctcctctcatttcctgtgaatgattgtgtgcaatgtaagcacagagcttctgcactctcatgatcaagtgctctctccatggccagaaacagcagtttctgaggggctcatgttgtaggtgatgatacaaagaagacagagagagggatcaggtgtcctaagtgtacatttcatctcagtattttctgaggtggggcatccctgtctcctggagaagtatatttttaatctagttgtttactttctttgcatagcccctgttccagtttctgacttccgagtgacagtggtcagcacgacggagatcggcttagcatggagcagccatgatgcagaatcatttcagatgcatatcacacaggagggagctggcaattctcgggtagaaataaccaccaaccaaagtattatcattggtggcttgttccctggaaccaagtattgctttgaaatagttccaaaaggaccaaatgggactgaaggggcatctcggacagtttgcaatagaactggtaagcaaataggcttttctgttaaaccatcatgtttcttaaaggaaatcagtataattaataaacataatgtttccaaatattgtttttcttttaattatctaagaaaaaactttaaaaattttcataacactaatgcttatttattatatgaaatacagacaagtaagtagaaaaaacttacatggaaaccatcaagcagagataatcacttttgatgtatgacattttacaatttttaaacatatacatatagatacacaaatatatgtgtgagtatacatatatttaatacatatatatttaatatttaatacacacacacacacacacacatatatatatatatatatatttttttttttttttttttttttttttgagacagtcttaccctgtcacccaggctggagtgcagtggcatgatcttggctcactgcaacctccatctcctgggttcaagtgaagcgattcttgtgcctcagcctcctgagtaattggaattacaggtgtgcaccaccatgcctggctaatttttatagttttagtagagacagggtttcgccatattggccaggctggtcttgatctcctgatctcaaatgatctgcccacctcagcctcccaaagtgcttggattacaggtgtgcgccactgcacccagcccacaaatatatatttatttctttcacaaacattgaggccatctgtacatgtggttttgtaatctgccttttccccaacttgccaattaattatgaatattctttcctcttaataaaatatttctacaggatgatttgaacacctgcctggaattccatcatctgaaacagagttggcagataagaatggcccctatgccaaatttggctcattgtctgtttttgtaaataaagttttattggatcacagccatgttcatttgcttatgtactgtctatggctactttggtgctagaattgagtagtggcagcagagaacgtgtggcttgtgaagcctgagatatttattttctggccattacagagaatgtttgctgacctctgggctagatcagtggttttcaaattgtggtccagggctctctagggatccctaggttctttcaaggggtctccaaggtagtattatcataacaatactaaaatgttatttggctttttcattctcattctcttttggagttttccaactttgatccgatatgggatgacattgtctctcaggtctaatggaatatatgctgtggattcttacattttaaaaatttcttcattttaaatccctgatatagtaaatattaataaatataacctatgtaaatacaaattctctgagagccttaataacttttaagatggtaaagaagtcctgagagcaaaaagtttaagaacctctggtcaagatgtgttagaaattaactactgtgctgtgttgggcaggtggactgttcacagtctttcctaaacaacactgtgatgagatactttgttagttctagaaggctaattgaaattgataaaatcattttatagtcagctacggtggcctgcacccatcgtcccagctacttgagaggctgcggcaggaggattgcttggcccaacagttgcagactagcaccagcctgggagaccctgtctcaaaaaaaaatttttttttatagaaacagtttaaattattaaattatttctaggcctacaggagaaacttctgggaaatcctagagagtaatgttcattattgttgttttaaaattttgaaataattgttttttggaaaggttgaaaaacatacagtcttccttgatctaagattcaagatagttgaaatcttttatacagagggtagaataaagatatacctaatgtaaatgatgagttaatgggtgcagcacaccaacatggcacatgtatacatatgtaacaaacctgcacgttgtgcacatgtaccctagaacttaaagtataataaaaacatatatatatatataaaagaaatgggacagattccttgaaacacacatgaaatgagttacgcttttgagattctccttgaagaagcttcttcaactgtgctggttgggttaagcaccgatagtcactcagaggatctgcttctgaaataagggatctactaaaatgcatccctcagatgaaatgcagtattccctttgcaaatctgcatttcagactgttgacatgacgtcttaacgtcaacatgtttcttctgtcttttaaggatgtggataatggtaagaggatcaccactgagggagatgcatgatgttgtgctacttgctattgcccagaacttactgtaacaataatataatatgctgggggtctgcgaagtgctgagtgctctcatactgcattttacatttttaacacaacttcatggagcaggtattattatcatttctgtcttacagagtaagaaatgggggctctgcaaacttaagtaactggcccagagtgacaaggtggcaaactgacctgtgtctgctgtctaagaccaagtgcttaaccaccatgtagattgacactttgatgtggtacagcagtaaagtttagtattagtgaggagagggcatctcttttactatagtttattgtgaatattctttcctcttaatatcagtatttctacagggtaattttaacacctgcctggaattgcattgtctcaaaggacccgtttcattcaatggtcccattgaatgaaagtcaagaaggcttgctataagatctaaactcttaggggggttacctttctattatcaaataacctttattgttattggaaaaagtcagcttaacagcattaaaagcaatttcaaaaaaaggaaacgaataccatatgatccagtaattccagtcctatgtatatctccaaaagaattgaaaacaggcccctggacagttatttgtacatcagtgttcatagtagtagcattgttcacagtagccaaaggtggacccaagatcccatcaacaaatgaatggatagataaaatgtggttcatccatacaacaaaatactattcagccataagaaagaaagaaattctgatttatggtacaacatggatggatcttgaggacattatgctaagtgaagccagacacagaaggacaaatactggatgattccacttacatgagtacctagattaggcaacttaatattctacagaaattagaatagaggttaccaggggctgttcagaggagggagtgggcattattgtttaatggctacagtttatgctggggataatgacagtgttttgggtacaggtagtggtgatagttacacaacattgtgaatattgatgataccgaattgtacactgacaaatggttaagatgataaatattatggtatgtatgttttaccacaataaaaatgaaaaggaacaaatatctctatttttctaacccaactgaattccttttctctctgtgtccacagtcatacattttgcttgtatactgtaattattatacaaatacttttattttgtatttgaatttctttttactcagtctataccacaactttcccctatagttagcatggccttcatatttttagtggctaaagagtatttcatcatgcagccagatcacagtgcccacagccctccccatgttattgaatatttaggttgtttctaggtttttatgtttatagacaaaggctgcctttcatgggcttttgtctgtggaatccctttgacatcaggaatctgctggtaggaaacaaaggctcctcccagtggcttctctgtaaggagaatccacttaaaattaaaaaaaaaattaattttggagtagatagtacgtaaacatggcacaattttttttgttttttggacaaggtgtttgcagtgaaagcatttcccttttttgtcccctacctgcccatttcctctccctggaggtgacgtttgttgccaggtaaagagagacagggttgaaagccgcggtagaaaataggcccagcctccgcggttacttccgggcctctatgtaggcatccctggtgcaggtggctgagtgggcagcgggagatgatcggaggatgggctcctgtgggagattccatttctgactctgctctgaaggtgcagggtgtgcctgttttcttcccttcctcatccgtcctcaaatgctgcaacttagtaaaggtcagctctccatttcagttttcctctttggtatgtaaggctgtgtcacgggaagatgtttccttctgagtgactgatttaaaaaacacaacaaaacaaaaaaacctctttattgagatataatatacataccgaaaagggatgtatcctcagcacatagcttcatgaacttttacaaactgaacacatcttgttaccagcacccatataaaaaaactgaatgtgatttccacttcagatgaccccttgaagggctttttttttttttttttttttgagatggagtttcgctcttgttgcccaggctggagtgcgatggcgcgatcttggctcactgcaacctctgccttccgggttcaagtgattctcctgcctcagcctcccaagtagctgggactacaggcatgcaccaccacgcccggctaattttgtactttttttgatagagacggggtttctccatgctggtcaggctggtctcaaactcccgacttcaggtgatccgcctgccttggctgcccaaagtgctgggattacaggcgtgatccaccgcgcctggcctttttttttttttttttttttttgagacagagcctcattctgtcgcccaggctggagtgcagtggtgtgatatcggctcactgcaacctctgccttctgggttcaagcgactcttgtgccccagcctcccgagtagctgggattacaggcgtgtaccaccacacccaactaatttttgtatttttagtagagatgggttttcaccatgttggccaggctagtctcgaacctctgacctcaagtgatccatctcggcttcccaaaatgttgggattacaggcatgagccattgcacccagcctaagggctcatttttaagacaacaacaaaaaactggagaactggtaagataaactgggaagttcatgtgcgtcacagaagagctgaaattcttgagagcactgagtgtgtgcatttctcagctcgattttggagtgtgccttttgtgaactcattagaaagcgtaatggcaaaagagcaggtcctctcgacagcacttggagaggaagctgggcgtcatgatagtaacagttttcccttctccttcctttcttctgagcagttcccagtgcagtgtttgacatccacgtggtctacgtcaccaccacggagatgtggctggactggaagagccctgacggtgcttccgagtatgtctaccatttagtcatagagtccaagcatggctctaaccacacaagcacgtatgacaaagcgattactctccagggcctgattccgggcaccttatataacatcaccatctctccagaagtggaccacgtctggggggaccccaactccactgcacagtacacacgtaagtctcttaggatgcccttctaaggaacagcctctctaactgtctcttggaggaggcactggttaaatgatggccagtgtgcttctgggatccaggttgactctgaaactgctgaagttgaaaacattggtctcagcaatggttctgctgtcaccatggggcactgttcttcaagctatgtgaacttagaattgtcattagaaggaagaaatgattccttgggaatggtgactgaaatggttctagtcattccttgagaatacagagtagagaagggtcaccttgtcatgttggtattggaagatactgcccagatgaggagcttcgcctgcaacagttagggaggtgttttgcgaatatttgaattaaatacatggtaaagatgttagtttgtaatatgtttttagtatatttttctccatctattagatttaaaaaacagattagaaattaaatgttaaaaatatatttgaaataaacttgaagtattaaaagaagcctaaattaaacttcttttgagacttaatctgtataattattttcttgatgtgtttttgggaagttttccatcttttgagccagcaaatactagttttattcattctttctaaaacgagccaggctatttttggatatagtaaatagtcctggaattctacttaatctgtgcttttacatgaattgccttttttttaaaatcaagggcccagcaatgtgtccaacattgatgtaagtaccaacaccacagcagcaactttaagttggcagaactttgatgacgcctctcccacgtactcctactgccttcttattgagaaggctggaaattccagcaacgcaacacaagtagtcacggacattggaattactgacgctacagtcactgaattaatacctggctcatcatacacagtggagatctttgcacaagtaggggatgggatcaagtcactggaacctggccggaagtcattctgtacaggtgagtgtagccccaactgcctcttggactcctccctgagtggtgctgaccttgcaggtcagtcctcccaagtctgtagtttgtctggttttgtgtgatgtgcagtgatggacattgagctttccgaggcatcctgttagcttatcggtgctgtctcgatgccctcatcatttctgcattcaataaatatttattgagcatataccatatgccagtcaagtccttgccttcttggaacttttcgaaggaggaagtgggatgtttacctagagtgctcaggaaaggcctcaatgacaaggtgacttttgagcaaagatctgaatgaagggaaggagccagccatgtggatatcagggcatgagaacattacaggcagaggcctgtgcagaggggcctgtgcagcatcaccactgtatctggaggctggaggaagagcaggaggcaagggtgggaggagtggacccgcaggaacaggaggatataggtgggaggtgaggcctgagtggggctgagccaggatgtggatgatatctggcattggtttgtcttttgtgctggagaagatgaaaagtttattgaaatgatgcccagcctttgcatccttcttgatcctcacctatctcacaactgaaaatgtgtgataaagagaagagccctctgtgtaattgaggatgctttcagggcagcccaggaaaggctttgcagacagtggtgggcacttctgctcacagtgctgactgtggcacctttatcactcagcacccgtgcactactcattttctgcccttctcgctcctacctcttccctttttagcccaggccattcagatatgttcaggctgatttggaagtgatggtctcatgggatcagcctccctggtagtataggagctccagccttgatggcctctggcttttcagtggtgagtggggtggccacagaaatccctgcagctttgggtcacttctgctccatcccacctggtctagacacccatctttgatatttgggtgcctttcattgctgatatttatcttagctatagttatttgtagcctatagcaagagaaaaactgtatctgagcatttatgactgggtgtgggtggaacaggagctgtaaaagtgggtgcagtgttcaggttacctttccaggccctgggtggcaaatgtgggtgttgcactaggtgccttggtagagcttctcctgctctaaaattctgtgacattcaattaatgataatactgtcctccagttgtaatatggagttttctatttacatcagtttgatgttagtcctcagtaaaaatctaatggccctcagatagagacaaataacactctattttgaagatgaggaaactgatgcatcatcaatggatgatgcagtatgttatgtgagtagagagtgtcttgaacttagacttagaaaacctgggatctagttttggcttcaccacctgccatgtcatcatcagccaattacttaacctctctgagcctctgtggatttatctgcagatgggacagtataggcctcacctgtctcagaagtatcatcaagagggccttggctgggctggtggctcacacctataatcccagcactttgggaggccaaggtgggtggatcaggaggtcaaaagatcgagaccatcctggctaacatggtgaaaccccatgtctactaaaaatacaaaaatcaactgggtatggtggtgcatgcctgtagtcccagcgacttgggaggctgacacaggagaattgtttgaacccgggaggtggacgttgcggtgagctgagattgcgccattgcactccagcctggtcgacagagcgagactccgtctcaaaaaaaaaagggggtcctcatgatgagatggtgcaagtgaggaggttgctacttctcacaggatgatacagctgactctcatggagccctggtctcttccaggcgtctttcttggtgcctgacatcattgttcaatttactcttcaaagagtcctgcagctgaggctcagagcagttgggtgactgacccaagctcacacagtttggtgttgcccaatttagggtcagcccctgcctcttccaccacatcacccacccaccttctcatccccaggattctgctactccctatttccatgtttgcaaaggcaaaagtcccggaatctcatgctgtgctgtacttgctttgcagatcctgcgtccatggcctccttcgactgcgaagtggtccccaaagagccagccctggttctcaaatggacctgccctcctggcgccaatgcaggctttgagctggaggtcagcagtggagcctggaacaatgcgacccacctggagagctgctcctctgagaatggcactgagtatagaacggaagtcacgtatttgaatttttctacctcgtacaacatcagcatcaccactgtgtcctgtggaaagatggcagcccccacccggaacacctgcactactggcatcacaggtgggctacaaggcaggggctggtcagttggcactgtgatcactcctggagcggctgacccacagtgggtctgcacgtgtggactagaaatctgtttttgtttttttatttcccctaaaatatttgcttttactgacatagactggtttctcattctatagaaatcaatctaaaaaagcagagtaagaggggctcattttttacattctaaaagattccttttctttacagcataactcattgcctcattgccatgttttcttttatatttttttgagatggagtcttgctcttgtcacccaggctggaatgcagtgacgcaatctcagctcactgcaacctctgcttcctgggttcaagtgattttggtgcctcagcctcctgagtagctgggactacagacacatgtcaccacgcctggctaatttttgtatttagagatggggtttcaccatgttggccaggctggtcttgaactcctgacctcaagtgatccacccgccttggcctcctaaagtgttgggattacccacgtgagccactgcgcctggtcgtcttttagcccacatctgttggtggcttactgtgtgctatggtgagggatactatggtgagtaggggcgacagggcccctggagcataggactgagaagagcattgagagggagaggatttccaggtctggtggtgggtgagctagcatgctgctgccaattttgcagcaaggacctggggatggaccttctctggccagctacagggtatagagctggtgggaaatgcaggagcctgtgctagcagttgaccattaacatgggaacgccacctcccagcgggcactgctgccgcatacttgcgaggttgctgaagcttgtagtttagagcaggaccatcccactagatgtgcaatgtgagcctcaggtataatttaaagttttctagaagccacactgaaaaaaaagtgaaaaggaatagccgaaattggtattaatagcattttacttaacttagtatattaaaagtattatttcaacatgtaatttctgtgaagtattaatgagttattttatgtcttcttttgtactaagtctttgatatctagtctgtattgtgtgcttgtagcacatctgaatgcaaactggtcacctctcaggggcttggcagccgcatgtggctagagggctgctgtatcagcacaggtttagacaattatgttgtggttgttttggagttcagatttctgtctccttgaatcttgaatatatataataatgagaacaggctgggcgtggtggcttatgcctgtaatcccagcactttgggaggctgaggtgggaggattgcttgagccaggagtttgaaaccagcctgggcaacatagcgagatcccatctcatttattttttaaaaatatataaaaaaaatgggaataacccaaactgtatgtgtgagatgaatttaggtagagagagagagtgtgtggagtggatcatctttaattcagtgtgttctttcttttgtgttagttcagagagtggctccataccctggcttggaaagggggggtgtgcacaatcatggaggccatccatggagggtcctgtgggggcttttctggtttctgggaagaggatctgttgggtttctctaggtggtatttgagaccaactctgggaaaaatgtggggactgtttatgaagaacacagagaagtgctgtgcccaggtctcagcagaaagtgtgttctctcccacctcatctgtgattcttctccttggacatttgctccgtctttgctctcagctgaccagctgatcctggggccaagccaagtccatgtggtgtcattgtgcagctcccaaggccacaccttagagttccaccacagtctctttctcactctccttcttccaccccagatctcaggataatgaacccggctcatcttgagtcatatgggactgggggagaggacaagggcaggttagcttcctcatgcaaggatactagcttcttactctaatgatggtttcttttactgtgcaaaaccttttcagtttgatttaatcttgcttgtcaatttttgcttttgttgctgtgctttttgtgtggtatccaagcaaccattgtaaatactatgtcaagaagctcttccccaatgtgtttttttttttttttaaacaaattttacagtgtacagctttaggtctaatgtttaaggcttgaatctattcagagtttatttttgtgtctggtgtaagatagaggtccagttttattatgctcacggatacacagttttcccagcaccatttgttgaagaggctgtcttttccccattgtgtcttcttgacatccttgttgaagataagttgactgtatatgtgagagtttaattctgggctcagtattctgttctatgggttgatgtctgtctttatgcctttaatatactgttttaattactgtagctttgaataaatatatcttgaaatcaggaagtgtgaggcctccagctttattctttctcaacgctactttggctattcctggtctttgattgttccatgtgaactttaggattttttttttatattctgtaaaaattgccattgggattttgatggagcattgaatttatagatcgctttgagtagtgtcaagtcttccaacaatgtgaagtcttccaatccatgagcatgggatgtctttgcatgtatttgtgtatttgtatcttctttattttatcgatgttttgtggttttcactctacaagtctttcatctccttgattgtattctaattatatttcaatcaatctgttaaaaaataaaataaaagcatgtactgttcaaaacaacaatagcaaaaccaaacaaggctgctgggtgcctgccctggggatttggctggatgccctgaaggggtcattgtgagctaggtgggtttcccaggatctgctgtctctgctcctcaccagtttccttccctgccttttgcttctggatttgctgttttgcacgagcccagcatgtagcttccagagtaagatcttgaggaggttgctgaagcatgttctctacctaatgtgttgctttggttttcaatattgggtgatcatgttttgttttgttttgttttagatccccctcctccagatggatcccctaatattacatctgtcagtcacaattcagtaaaggtcaagttcagtggatttgaagccagccacggacccatcaaagcctatgctgtcattctcaccaccggggaaggtaaggagaggcctccgtgggttaaacagcccatgagtgatgcagtgaccagagctttctctgtgcccactgaggcatgtgagtaatgcagacacacgcctgtcttctcactgcagcctatgctgtgtactcagacagagaaggagggtgaggtatttgcctgatggttgacaaactttctggaaagggccagattgccaatattttaagctttgcaggtggtatagagtctgttgcaagcattcgactctgccattgtagtgtgcaagcagtcacagaagatacagaaggaatgagtgggaccattcccactagatgttatttaccatggcaggtggatttggtttgtggcccataacttgctgatctgtgatctaggtttttcttctcttttacctcactgggccttttaggtggtagaatattagttttaaccaactctgtctctctctctcactctacacacgtacacacatgccatcctcagaggatgactttcctttgaaagaaaatagaaaaagatttgcatttgctagtgggaatttgcagagtatctccttagctgagagaagaggtggattaaaagctgcttttccttaaagggctctgttacattcttttgtggtaggaaaggaatcattcgagagtctcttcggtagctgtgtttgagtgcttgcataaggcctagatttaaaagcccaagttttgttgtgggggttccctcctccccctcccctcctccccctcccctctcctcctcctccccttctcctccccctcccctctcctcctcctccccttctccccttctccccttctccttcccttccccttccctctttctttcttttagagacaagatctcaccatgttgcccaggctggtcttgaactcctggactcaagtaatcctcccaccttggccttccaaagtgctgggactagactacaggcatgagcctctgtgcctggtctgggagattctttatgcatgaataatgcagtgtttcctctgcccactctctcctactgtggtgctgtcctcatgtccttgaggaggatagagaccaaacacactgtcggggttagggatctgggaggatagaaatttgctggtgccataacctgtggcaaaatttcaaaaagtgaggttgaaatctctatcttttaattttgggtctgtttccagctcttagtcattttgctgtgatgcttgtcagcaagtcccattgaggaaggccatgttgcatagcagccagactgaccagtgctggcctgtgattagatgaaaccttgggctctgagcccgatgccctggattgggaacccaactctacctcataggcagtgtgaccttgtgcctggtcctgttagccttttgtaccttcgttttcttgtctgtaaaatggagacaataagcttatgtgatgggattcatggggatgaagtgagttactgtaggtgaaacccttagaattcaatgtaagtcaaacctggcacagagagatacttgagagatggttgctgatcactatcacccaacatcaccaccatgtagatatgcaggagaagaaatctctctgccatcactttcttatgattctccttctgtgtacctttcttagctggtcacccttctgcagatgtcctgaaatacacgtatgaggatttcaaaaagggagcctcagatacttatgtgacatacctcataagaacagaagaaaagggacgttctcagagcttgtctgaagttttgaaatatgaaattgacgttgggaatgagtcaaccacacttggttattacaatgggaagctggaacctctgggctcctaccggtaatgtcttctggttcttactctttgggggctgagcctcatgagcataaagctctacatgcctgcggtcagacacgtctcagggacctctttttgctctttgttatcccacagggcttgtgtggctggcttcaccaacattaccttccaccctcaaaacaaggggctcattgatggggctgagagctatgtgtccttcagtcgctactcagatgctgtttccttgccccaggatccaggtagggagaagacaacagtcctggcactggttcagtggcattttgctccacgtgtccatagaaggccagctgtgtacatgcctccctcagaccttcaggagggttggtgtgcccagctctcccctcccagaggttgagatgtcactgggtcaccgggcttactgggcttcctcctccgaggtcccacagcctggaccccacactctcccttctctaagtgccagttgttcttccaatctgcaaagattattgactccccttatctatgtgtggtcacttgtgggcccatatgccaggtgcacagtttgacacattgcattgaatccttaaatagtagaatcagaggaagccacataaattgtcttgttcaatcctctgtttatttttcttcataattttaattatgtttattgatttgtttattttattttatgttttttttttttttttttcagacagagtcttgctctgtcacccaggctggagtgcagtggcacgatatctgctcactgcaacctctgccttctgggttcaagcaattcttctgcctcagcctcctgagtagctgggattacaggtgcctgctaccatgcccagctaatttttgtatttttagtggcgacggggttttgctctgttggccaggctggtctcgaactcctgacctcaggtgatctgcccacctcggcttcccaaagtgctgggattataggcgtgagccaccatgtccagcctatttattttatttttgagacggagtgttgctctgttgcccaggagtacagtggcatgatcatagctcactgtaactttgaattcctgggctcaagggatcctcctgcctcagcctcccaggtgggaccacagttgcttaccaccatgcctggctaattttttgtagagatggggtcttgctatgttgcccaggctggtcctgaactcctggcctcaagcctccttccaccttcttccaaagctctggggttacaggtgtgagccactgtgctctgcctgctttttggaagtgagacttttaaggcctagagaggggaagtaacttgcccagggttacacgatggctttagaggcaggcctgaaattctggtcttggacccttgttaagtgcttctaccctttatcacatagacctaggtgatacaggagcttcagggatccaagaggggtgcatcccctaccttcaagccagaggctaatggactggctggtttgttagtttgtctgcttttctttcctagttggtggttgttgggcgcaggaaagaatgcctgccccagaagcaaagtttagggagtccccacatccttccccggtaaacaaatgggtttcctgtcacctgagcatggatgctgctgtaggtacctctgctcatatgtgggtgctagtctcaaaatgtcagaggtggcaggaaaaatatctgaaaatccagcccagttccctaaatttgcagttgaggagacagacctggagaggaacagtaactttctcaagaccatccaggtagtagtggattgggaacaggaacctggcttctgcatgcatagactagttttaggtccaaagctatttaactcccttgtgtgtgtgtgcgcctgtgtgtgtgtgtgcatgcatgtgtgtgtatggtatacacactttaactctctggtgttagggtcccaggccagtttttagcacattgtgtggtctgcatgaacacctcttgaagtgtctcccatttggacttttctcaggtgtcatctgtggagcggtttttggctgtatctttggtgccctggttattgtgactgtgggaggcttcatcttctggagaaagaagaggtgatattgcttatgctaataataatactctggtatttaaggaagctttctattaaggaacatttcaaactttgacagattcagaaggaatgatatgatgagcgccatgttcccttcacccatagtgttctgcatttggccagtcctatttcctctgcgcccccagctgggcgatgttaatgtgctcccagctgtcacatcaggccactgatagacgccacagtgtgggatgctactttcaaatgatatgttcttgtttacaagtcagtttcatagtattatgatgttaagagatttcatttcagaggtagctaagtttgaacaccagctctgtctttgaccagctgtttaggaagcttagccttaatgtcctcatctatgataggaggataatcattgtgcctaacttgtgaagctgaggaggattgaataaataaggcacttctcagtgtcttgtgccttgtatgctattactattattttatctgtacaactaccctgtgaggtcattaaatggtaaaagtagcagccctgttttgagtgctcaccgtgtgcctgcatctgtgctttctgtgaattatcgcatgcatgaggctctgcgaggcaggtccagtaagtcccttccaaggatgcagaagctgagtcaggaagtgtggaaatagaacttgaacctggtccttgcacttcatggcacgccctcttgtctgtgtagtgtgtgaagcctgtgtgtgttagttgggatttctttgctgtaaggtgctgccaaccagggaatctccatcctgccttaggggtcctcatgcggcccaggccggttccttgtgctgccaccctgccctgttggagtgacaggcagagctcatgctccagcttttaggttaggttctgtttttttttttttgagatggagtctggctctgtcccccaggctggagtacagtggcatgatctcagctcactgcaacctctgcctcctggttcaagtgattctgctgcctcagcctcttgagtagctgggattacaggcaccgccaccacacccagctaatttttgtatttttagtagagacggagtttcaccatgttggccaggctggtctcgaactcctgacctcaagggatctgcccgcctcagcctcctgaagtgttgggatcacaggcgtgagcccctgtgcctggccagattaggttctgattttggggggggaaatggatcagtcagtggctggataaaacagttttattgtttcttgttaaaaataagagtaatacatgcttatggcaaaaaatatagaaaagaagagcaaaaataaataggaaatctgcaatcgcagaacccacacaaaactactcttaacattttgatgtgaccaaactcacacacaaatgtgtgcacacacatggaatcatgttacatgttagaatcaagcctgctttattcagcttagacattgttggcagcttcatttcatcacaattttttttttttttgagacagagtttcgttcttgttgtccaggctggagtgcaatggcgtggtcttggctcactgcaacctctgcctcctgggttcaagcgattctcctgtctcagcctcccaagtagctgggattacaggtgcccgccaccatgcctggctattttttttgtatttttagtagagatggagttttgccatgttggctggtcttaaactcctgacctcaggtgatccacccgcctcggcctcttaaagtgctgggattacaggcatcagccaccgtgcctggctcatttcatcatcattttaagtggctacagagtattcaactgtatgacagtaccatgatctagttaaccaatttcctaggtgtttccaagttttttttcttggccacagttacttatccttgtgcctaaatctttgggcacattcacgattatttccttaggctaaattccaagctaggcaagtgctgggtcagtgggtatgcgtgctttcagttttgatacatactgccaaattaccttccagaaagtttttcttaaataccaatgcagagttgagtcaacagtgcaggagtgtgcagatgcctcaccaacttgccagttccggatctgatatgttttttggtttattgcattcatttatcagaaaagctttctcaaaaacaaagtatgaaataacaagtcttgctttacattaaagtaatgccactgctatatatttgcaaggaagttcttaaaagtgacttggatatgatttttttcattcttttagatagtacaaaagaaaataacttcacaaatttgtaattagcatttgcagcttgggtcattaagtttagtattagggggcaggatttggtgtcagctgtgaactaatgcctgaggaaaaggtgtaacacctttatttcatagatgacatcaactccagatacacaagggaaaagcacaggaaggaatccttttttgtctaatgggtctcttttctcttaaaacaggaaagatgcaaagaataatgaagtgtccttttctcaaattaagtaagtctctcaaattatgagctttattttaaatcctccaatctgttcggtgactatctataaataatttttgatggaacttgctgtcatttttcctgattggcacattttgaccatgaccatctggaagtttttgctagctctgttttctgcaaggaatctatgttttattagtctcctgaagctggcttccttgtcatgttctactcttctaccaataaatacggatttcttgattaaaaaaacgtcaaataggttatcaagatccaggggagagaagaacttacttaaagtcacaaaaccaattagttacaaagtagggtctagaaatcagatttcctgaatcatattttagtgttttgtgaataatagtactctgaccccctcttgccaaattataccctgggttttgttgttttgggaagattgtttactgtcatttctagagtatgaatgagtctttctaattgcatattttttctttccctttctatcatgaagacctaaaaagtgagtaatctctttattttttttaataacttgtacttttctattgaatatggacttcactgaatgtaaaaaatcctgataagttttgttttcttagatctaagttaatcagagtggagaattttgaggcctacttcaagaagcagcaagctgactccaactgtgggttcgcagaggaatacgaagtatgttgctgtaaatactgtttttaattgtgtcaggttccaacccaagctgggatctgaggggagttggtggatgggtggcaggtagctgaaagaacactcgagggactgtaggcagttgggacatggctttattctctctcctacagagtcagcagtgcagttatattactcacagacaatagtggctcaaagccaggtatgaactcacacaaacaggttacattaaatggctatataacgcaaggggttgttgcgctccaaaccctttgcgtcatactgtcctggatgtctaccttggactactcctgactgaagcacagccactttccttagaaattggcttgtttttcctgaaagttagaaaactgttaacagaaactaggaattcaagtcagggaactgttagccacaatacttaggaagctatatgagctggaaagaaaccaaatgggcatgtagaggtctggggcttgatggcagtgtggcctaggatggcttgtgaggctcacttctgaagccctgcacaaggaatttcttggccagtgtctgcctttcagttccccatgctgtgctccaaccagcccaggaaccagccctgctcagagtgaccatgcacactcgtcctcctgtgctgccctgtccagcatctctgcctttgctctcttgaaatcctgctcagcactcagcacagtgcacatgctgcttcctccatgggcattctgggatcccattaggaggacttgagttctgtgtgctcagactgccttgtttcccctgttgcttgttaccaatattcagcatttctttaattctgcctttttgtaatgttagttttttctgtgtacagtacacctctcctccaggttgcaactgcttgaaggcaagggttatcctttttcctatattctaacctttgtattagttctctaggctgccataaaaaagcaccacaaactgggaggctgaaaacaacagaaatttactgtctagaggccacaagtcccaaattaaggtgtgggcagggtcacactcccttctaaacctctgggcagcgcccttccttgcctccgcagcttctgggagccccaggcgtcccttggttttgtggcagcaacactctgatgtctgcctctgtgttcacatggccatctcccctcatgtgtctatgtctctttgtctcttttcctcctataaggacactagtcatatgggattcagggcccactctaatctagtatgatctcattttaatttgtttacatttgtaaagagccttttttttttatactttaagttctaggatacatgagcacaacatgcaggtttgttacatatgtgtacatgtgccatgttggtgtgctgcacccattaactcatcatttacattaggtatatctcctaatgctatccctccccccaccccatgacaggccccggtgtgtgatgttcccctccctgtgtccaagtgttctcattgttcaattcccacctatgagtaagaacatgcggtgtttggttttctgtccttgcgatcgtttgctgagaatgatggtttccagcttcatccatgtccctacaaaggacctgaactcatccttttatggctgcatagtattccatggtgaatgtgtgccacatttttcttagtccagtctatcattgatgggcatttcggttggttccaagtctttgctattgtgaatagtgctgcaataaacatacatgtgcatgtgtctttatagcagcatgatttataatcctttgggtatatacccagtaatgggatggctgggtcaaatggtatttctagtttcatatccttgaggaatcaccacattgtcttccacaatggttgaactagtttacagtcccaacaacagtgtaaaagtgttgctatttctccacatcctctccagcacctgttgtttcctgactttttaatgattgccattctaactggtgtgagatgctatctcattgtggttttgatttgcatttctctgatggccagcgatgatgagcattttttcatgtgtcttttggctgcataaatgtcttcttttgagaagtgtctgttcatatccttcgcccactttttgatggggttgtttgattttttcttgtaaatttgtttaagttctttgtagtttctggatattagccctttgtcagatgggtagattgcaaaaattttctcccattctgtaggttgcctgttcactctgatggtagtttcttttgctgtgcagaagctctttagtttaattagatccaatttgtcaattttgtcttttgttgccattgcttttggtgttttagacgtaaagtccttgcccatgcctatgtcctgaatagtattgcctaggttttcttctagggtttttatggttttaggtctgacatttaagtctttaatccatcttgaattaatttttgtcagtttcagctttctacatatggctagccagttttcccagcaccatttattaaattgggaatcctttccccattgcttgtttttgtcaggtttgtcaaagatcagatggttgtagatgtgtggtattatttctgagggctctgttctgttccattggtctatatctctgttttggtaccagtgccatgctcttttggttactgtagccttgtagtatagtttgacgtcagctagcatgatgcttccagctttgttcttttggcttaggattgtcttggcagtgcaggcttgtaaagagcctatttctaaataagatcccactcataggtattgggggcgagaaatccaacatatctttttggggcacagtttaacccatatcacctctacatttccactttgttcttttgctaccaaaacaccacgggtttggtctaggtcctgctcctcacctttacagaaagccaatcactgagatgacaaatattgccggggaagaaagctttaatcgggtgctgcagccaaggagatgggagctgaatctcaaatccatctcgctgactgactaaaaccaggggtttatacagcaggaaagaaatgtaacaatgtgtaagaaaacaggaactaggggctgggcatggtggctcacgcctgtaatcccagcactttgggaggccaaggtgggtggatcacgaggtcaggagatcgagaccatcctggctaacatggtgaaaccccgtctctactaaaaatacaaaaaattagccaggcgtggtggtgggcgtctgtagtcccagctactcgggaggctgaggcaggagaccgcgccactgcactccagcctgggcgacagagcgagactctgtctcaaaaaaaaaaaaaaaaaaaaaaaaaagaaaacaggaagtagggaggggcaaggaggcatctggtgcagtgatctgactagtttcagttctttgttactccctgaaggtcctttcctgagaaaggaactcagataaaacaaatacaagtttcaggctttaatagcagaagggtaaatttctatgtttattcaaaaacaacttgtctatgggactgttgggctggtttcactgtcatatgctatgctaaatatgaataatatttgaagactaaataaatgaacacctcatttgttttgttttcaggatctgaagcttgttggaattagtcaacctaaatatgcagcagaactggctgagaatagaggaaagaatcgctataataatgttctgccctgtaagttattttatctacagcatcttctctgtgttccatcagtggccatcacatctctaagtgtagaggggagggaatcagtgatcctaagtaaccacttccacaaccattcattagtcacctacttccacaaccatccattattcacctactatgtgctaagcactatatttaggtgcattctcttaaatcctcacaacagccttatgaagtaggtagtagaatatttgttttgcagatgaggaaaatgcacagagtggttaggtgatctttccaaggttacacaggtagtgacgggaaaactcggctttgtactaggtctgtctgtctcagtaagggaaaaggccagagtctgtgttcttaacccctctgtctcacaactatttatttcagttctataattctggaatgaaagtgagcagagggagacggggagtcacactctctgtgtccagacacatgggctgagtgaattccacagctaagtatgacttatatttagctcatttcctgtttttgagaattaacaatgtctgcatcttagtcaacaggattacagcaaattgagtttaaaataagaattatttattacatcaaaccattagatgaaatgtaaataattctccattgaaagttccttgtaatctctcttttgggtggggattagggcacagagaggagcataagcagattgtagccatgttctgatggagctgaaattgatagactttgcagataatttttacatcaggacgtcatcatctttattcgaagccgtgtttttcattcctggactaaaacattaagttctttttaaattcagcattttctagttcttgggttctttctctccatttatttccttgtacttgacaaggagtattggcccatgttctgagggaaatgcttttaaaactaggctgggggtattgcccttgtaagggtaatttgggattattggcccctttttgtgaatgtctgtggagattctcagatctggagtgggagctgggaagtgggtgtttgggtattgttcttattgggaagcctttaggctgagactcaggtcagtactagacttagcattgttatgttattttgtccagaggagggtgaggtagtacaatcagagacggggaaactgaggtggtgctgcttctggctcagcctgacacttgcagttctaaggttattatttcatctcttaagttgggcaagtttgtgtgtatgcttttgagatgacaataatatttataaaacataattctgtgttttagaccctcctactcatagtagtcttatacattcaatttatacttgaacttggtactctgtttttataacaacttgtttatatgagaatagaggcagagtagaatggttaacctagggacctaccccgtcctagtggaaggggcactagatttgaattttgactgcccctcaccagatatatgaacttggagaagtcacttaatctctgtaaccctcagtttcctcatctgtgaaacagggcagtggcttgtagggtggttttgaggagtaaataaaattgtttagcatattccctcatggtagacacctgaggatgctaatagtaacaggttcattttatgtgagaaggcatctggtgtggttaagatcttgggtcctggtgtcaggctgcaggttcaaatcctggccctgccactcattagctctgctctggtgatcatgtgacttctctgtgccacggtcatatagagtgaccatgaggattaaatgaggtggtctatatgaaatgccacactgtgcatcttcaaagacacaagtcccagttttgccattttgaatttcatttttttttctgttttgtgtccaactttactaaaacatttgcttataatggggaccttttttcttttaatgtcacagatgatatttcccgtgtcaaactttcggtccagacccattcaacggatgactacatcaatgccaactacatgcctgtaagttgggggacggtctcacagcactggactgtttcgatgaaatcttcagtgtgctttgcttctttctgtttctttgaggttgactatgtgctgtttcccatttttagggctaccactccaagaaagattttattgccacacaaggacctttaccgaacactttgaaagatttttggcgtatggtttgggagaaaaatgtatatgccatcattatgttgactaaatgtgttgaacagggaagagtaagtatcttttttagtttttaaaatttaaaattacattaattgctttttattgtggcagaagggtatcttaaaaaccatttgtttctttaaaaaaactcaaacattagcactttattcttataaacttgttttctgtctttttttccccataagagaaatgtttaaaaacattctttaaacaattctattttgtcattatcttttttttggacaaatatcagtgtcttctgtttattacgttgctgctggagttagtaaatagcaaaatctcccaggcctagtgcaagatgctgttcacggtgtggctctgttcttcattggccccatgaacacggacaagcccatcatgtctctaagcaaccggtgtcttcatctgtgagatgagggttttcatcagctccatgattttcaaatttaggttgagcactgaacccctcctgcctccaccccagggttttttttttttttttttttttttttttttttttttgagacagggtctcctctgtcagccagcctggagtgcagtggtgcgatcatggctcactacagctttgaattcctgggctccctcccacttcagcctcctgtgtagctgggactacaggcgtgcaccacatgcctggataattttttttatttttagtggaggcaaggtctcactgtgttgcccaggctggtgtcaaactcctgacctcaagtgatcctgcttccttggcctcccaaagtgttgggatttcaggcgtgagccatcacacctggcctggaaccatttctttaagcaaaatctcagacttatccctggataagcctcagcagcctcctctctcctgcaacgtcctgaaatccctcttctgcttccatcaaagataagattttttttttttagatggagtctcactctgtcgccaggctggagtgccgtggtgtgatcttggcttttgcaacctccgactccctggttcaagcgattctcctgcctcagcctcccaagtagctgggattacaggcaggcgccaccatgcccagctactttttgtatttttagtagagacagggtttcactatgttggccaggatggtctcaatctcctgaccttgtggtccacctgccttggcctcccaaagtgctggattgcagatgtgagccaccgcccctggccaatattttttatagtaataaaattctgcatttccatgaattgatgtgaagagaactgaaaaacacatgctaatctaaaaaaatgctgtgccttaggaatgggacttaatgttgctttatgagttgtttttaagtgtaggttcattgcttgaggaataggattcgattccttaagccagtggatctcaaactttagcatccatcagcatcaccaggagggtggttctaccctcagagtttctaattcggaattgcgtttctgccagtttctgggtgattctactgctgtggcaccagggtgcacacttggagtggtactgtccccaggatagtgggagcccttcaggcatcatttcttttattgttctttaattcatggtaagctagcagatgtttatccagcccctggtatatgtaagatcctgtgctaggggctgaggatggaggagggaaagataacagagcagtaagagatgacgcccatcctcatgttgcttgtgatagagggtgggctccttaccctcttgttgaatcaggagaataggctgtaatagaaataaaagcgtttttaaaatgaatgctgataggctgggtgcagtggcttacagctgtaatcccagcactttggaaggccatggtgggcagaccacctgaggtcaggagtttgagaccagcctggccaacatggcgaaacccatctctactaaaaacacaaaaattagccaggcgtggtggtgcatgcctgtaatcccagctacttgggaggctgaggcaggagaatggcctgaacccaggaggcggaggttgcagtgagccaagattgcaccactgcactccagcctaggcaacagagcaagactctgtctcaaaacaaaacaaaacaaaaaaagaagaatgcaaataagctttttaatactgttgagcccagggccttatacatgaaacattcttataaatctatctgttagacaaacaaaaatgacataattacattaatggagaacatgaagatgaatttaaatggtcttttgttcatctaaaatcaagattgaagttagtcttagtgaccctgggtgaatggggaagggagtgtattttctgcactagattctccatatatgttattttttttctgtaacaaccctgtgaggtattatgatttcatagatgaggtaactgaggcttggggagtttaagaacttgcccacaaggtaggaacaaaaatatacctggtaagaggctgagctgggaatcaactccatgtcagtgtgtatccagatcctgggttgtttctttggaacctgggtctttaaagaaatacagatcccgcagccagagtcagaatctctggaggtagaacccaggcatctctttttaaacaaaacaaggccaggcacagaggctcaggcatgtaatctcagcactttgggaggccaaggtgagaggatcacttgaggccaggagttcaagaacagcctgggcaacatagtgagacccccatctctacaaaaatacaaaatagctgggtgtggtggcacgtctctgtagtccaaactcctctggaagctgaggtgggaggatcacttgagcctgagaggttgaggctgcagtgagccgtgatcgtgccattgtaccccagcttgtatgacagagtgagactgtctcaaacaaacacacaaacaaaaaacagaaaacaaaacccaaaacaactcaaacttctcaggtgagtcagataatcaattagctttgaaaactaccagcagtagagcacaccttagaatactgagtgtgtgtgcgtgtgtgtgtatgtggggtgtgtgtgtgtgtgtgtatgtggggtgtgtgtgtgtgtgtgtgtgtgtgtgtgtgtgtgtgtggtcatttgccaaatgggtattcagatattcttggagagcaggtgtttcctggttatttctgttcacatctgcccaccaactttatagaaatcaaagaccccagaatgatttaatttgattttctttattggtgtgtgtatttgtattgcaaccgatgtatatctgaaagccttgggaaaaagtcctcatttcttccagctgtctggggttatgggagaagatgaggtcagtgaacagttgtggtggctactctaggggcaaagggagctggatggggactgtgtcctaggtcaagggacagctgctgctctgctctaaatcaattttcatgctgaaagcagggcctgttgtaggcagatctgatttttaaagagaaaataagtctggatttttatgagaaattttaagagttggcaagaattgtaaattaaaaaaagaaaaaacaattccaacaggtgctgtggtgtgcccatagacccagctacttgggaggctgaggcatgaggattgcttgagtgcaggaattggaggtggtagtgtgctatgatctcatttgtgaatagccaccacactccagcctgggcagcatagtgagaccctgtctctataaaataaaataaaaaaattcgaagggtcaaacaaaacccaactagaaggtctgattccatctctgatgccagttttcaatagccagtctcccttgtgaggttttagtgatggcagatggcatgatctgagtcttcttataaaaatgcaattttgttctagaccaaatgtgaggagtattggccctccaagcaggctcaggactatggagacataactgtggcaatgacatcagaaattgttcttccggaatggaccatcagagatttcacagtgaaaaatgtaagtaagaagtcaggatcagttgagctcatgtaattaccatatgttaatttgggggtgatatgttttaggttgatattaactaatatgttttcctatgcagtgagaaatgttttgctgctttcctttcagaacagaacaatccatatgcatgtatactccaaggcaaccccttgacttttctgggaaatttactttcttgggaataacctaagttatttctgaataaaatgaatcttaagagcatggctctacatcaggaactctttcctttctttccacttccaggtgacttgctcatagattttacagaacaaactgtagccttttggattatttggttagaaatatggcatcaggagcggccacttgctgttaggagtaattgataacagttacattaataggattccagggcatatgcacatggccttccttcccctcaaaatttacaaaagcaaatccaattaaattgtgcaggcattctaggaagtcaagtttatgtgctttttttctttttcaaggatgctttgaaaatagaggcagtgccatgaagcagcattggtatctgttgatgggtgtgtgcattggcataactctctgctgtttatatcacaggcctaaacattaggcatgtgctggcttgaagtctgagactatcctaaggaaataatctgaaatgcaaccaaaggcttattcagaaagacgagtctcagcattatttataatagaggaaaactttggaaaccatgcagacatggttttgtagcttttgtagcttttgcagaatggataacttaactatgactcgtctgcttataatatcattattcagctattagaaatgatggcccaggtgcggtgattctaacctgtgaggctaaggtgggaggatcgcttgagctcaggtttgagaccagcttgggcaacatgctgaaactccacctctacaaaaacaaaaccaaaccaaacccaaaaattagccaggcatgctggtatacacctgtagtcccagctacttggaaggctgaggtaggaggatggcttgagcccaggaggtcgaggctgcagtgaaccgagattgtgccactgctgcactctagcctgggtgacaaagcaagacccggtctcaaaaaaaaaaaaaaaaaagataaataagggatgggtagactatataattaccatggggacatggtaggatgtaatgtaagagaaacattctaggagatgaaaatgtatgcatattatgaatagtgcataaaaggaaagccgggaagtatagattcactggagttgaatcttgaatcttttgggtgggttttgggggttgatgggttagggtctagtttatgagattatccttgaagattccacaagtcatggataaagtatagtatattaagtagtaattctttactaattgctgtgtctcaaagggtctggcctcaatatttcagttcctcctctggagatgccatcaaagctgttaccatgatctggccacctaaataatgcagctcacagtagtagaaaaatgtcatgcttatttcttttcttttcttttcttttttttctttttttgagatggagtctctctctgtcatccaggctggagtgcagtagcacaatctcagctcactgcaacctctgcctctcgggtccaagtgattctcctgcctcagcctcctgagtagctgggactacaggcacctgccaccatgcccagctaattttttttgtatttttaatagagatggggtgtcaccatattggccaggctggtcttgaacacctgaccttgtgatccacctgctcggcctccaaaagtgttaggattacaggtgggagtcactgtgcccggcctgtcatgcttatttctatagattttgctcatttgaactgactggcttctccttggttgcctccactgcttggggcttaccttgtggaggggaatttaggatggagttgtccacatcatttttaaaaattgctgttactatgattattattttttattaactaaactccagactttattcagatttcatgtttttccactaaagccttgttttgttcctggctctgatccaggacaccacatggcatttagtaccatgttattttttaattatacaaaatgcctgaatacattttcctttagaaaatcgagaaattacaaacagagctaaagatttcctttgactaccacccctaacctgagcccctttgcccctccacgaagataatactaagtataaccctcctcacttctccctcttcctctccccctccttctccccttgcccgctcccactccctttcctctccctcctccctctccctcctccctctccctccctttttcttcctcttcccccacctccatctctcacagctggtttctgtctttggatcagtacttctggttaaatgtgtgaatgttaactttatctgtgatgaggtcttctagcacctctcccttcactctgtctgtttttcctgttttccaaattttgaatactgcacattcttatcatgaatatacatttcaaaaaatgagtgtcaaagggcagctgtcataatggagatggaaatgcctgcagtgcagatgtaggtcacatgggtacggatgtaggtcacatgggtatggtcattccctggtatgggcataacgagtacagctgagtcagggacaggactcgccccagctggggtgggcttctggtgcttcaaggtatatgctttggtatgaggtagggaaccagtctgtgtaataatgagctctattgtctttcagatgttgaaatggatggttttttgggggagtcctttctcagctctctccaattctaaatatttgcatggtgcttgctagtggcctgtcactttattcacttctctaggggacatagtgaattatgaggccattcttgcctagaaggcactgattatcatggtgtatttgagtaaattatttttggttttattgtcagtgacattcccaggggggctcggggatggggctcatgcagctctaaggaggtgcaggtgtaagaatgtgagttcattattgataggcagctgtggcaggaagggaaggatctgaatgcagaattggaggatgagggacttctgttgcatctgaaatcagtgttggggaaatgacttcacttctgtgaatctctgctgcctcatctttaaagggggataataaactctccttcttgagcatattgtgagggtttgatgagcaagcactttatcagctgctgtgcaaatgtaaagtttaatttttagtcattacaactcctggttagtactcaggctctgcttgatttcccctgcctttttgatgttgttaggcagcctttctgtctggatctaaatcattttctgggcttttagatccagacaagtgagagtcaccctctgagacagttccatttcacctcctggccagaccacggtgttcccgacaccactgacctgctcatcaacttccggtacctcgttcgtgactacatgaagcagagtcctcccgaatcgccgattctggtgcattgcaggtacgcagatggcacgtcacgtgtgacagatttcaaatgtcattatatatttatgagcactttacaaaagcaaagcctaagagggaatgtaataggcatttatgaattcaggaaaggtttggataaggaaccatggacttactccctaagccctgagcttccaaaacaggggttggcaaactgtaacccatggatcaaatctggtcagctgctgtttttgtaaataacattttctaggaacacagcatgcccatttatttatatattgtttatggttgcttttctgctacagtgacagaaagagaccatatggtttgcaaagcttaagatgttaactatctggccctttactgaaaaagtttgccaacccctaacaataagaagttagctttgaagctaaaggaattaatttaggacagaagacaggaggggctctgttgcccagtggggaaaaaatggctaaaatgtgccgccatcctgggttatgggcaacttgaatggaactgagattgaagaagcttgagcaaagggttatatgtgtggcatctgactcaaatgtgagtttgggacttaggccccagtcccaagctagtgctgtctgacttgctgaggcttcaactgagcaaatgtgtactgatcctgtgcattgccctcaaagtgtgacagtgaaggaaagcaagatatatgtacaaatgaggaactctaagagggttgcagtcgagggaacccactgtaataggcttatttctcttttctctcagtgctggggtcggaaggacgggcactttcattgccattgatcgtctcatctaccagatagagaatgagaacaccgtggatgtgtatgggattgtgtatgaccttcgaatgcataggcctttaatggtgcagacagaggtgaggccaagatctgtatttgacattccacccttcccctccattttttttttttttttttttttttttgagacggagtcttgctctgtcgcccaggctggagtgcagtggcatgatcttggctcactgcaacctctgcctcctgggttcaagtgattctcctgcctctgcctcccaagtagctgggattacaggcacgcacaccatgcccagctaatttttgtaattttagtagagacggtgtttctccatgttggccaggctggtctcgaactcctgacctcaagtgatctgcctgcctcagtgtcccgaagtgctgggattacaggcatgagccactttgcctggcccttcccctccatttttaaaaggttgcattgtgtcatgcacttgtgttaaaatatgtcacccttccagatctttccagctcttggctgtgaactaacactggatttctttgcagactttaagctgacttggaattaaattacccaatacaagtgacatagtagtactgatgtcagtaatggaactactactgagatagtgtcaggattctttaccttgctgcctctgactcattaaataatcttaggacatctttgaactttggcttccaggttttaaactcataaaactggtattttccagtctttgtttctaagaaggtctgaccatctttaaaataagctaatgaaacaaactcatcaaacattaatgatgtgacatatcataatgctgcttaaatgttaatacagcaatttatcctcacccagacttgtacattttaaagactatcaattatcatagctacagaagggtggctgaccagcggagaaaaggaacacttaatatctatggtatagtttctgtactactgctggatttggttttacccaaactgttactgagaagtgtttttgaggcatgttttcaacagaacatattgcaaagttgctttcctcaaaggggtgaatgttccttgaccaggatgagagcagaatattaattttgtatcaggctatcgtcctgtaccgatttagaactctatgaatatgtgctgtgtttttgagtctagcagggaatgttctagatgcctgggtacattgcgtgctctggggtgagcttggtggttgttgtggaaagagtgaaattcaactcctgtgttggtcaaaagagagattttcttttttctgctataattatataaagtagtatttctcaatcttttatccttttttgagaaacatagaactcttatccctgctactagagtctaatctcttttttatattttgaaaacaatacttattcatatgaaagcatttgacaatatatttttctctcctcttttttttttttttgagacggagacttgctctgtcaccgggctggattgcagtggtgcgatctcggctcactgcaacctctgcctcctgggttcaagcgattcccctgcctcagcctcccaagtagctgggactacaggcgtgtgccaccatgcccagctaattttttttttgtattttagtagagatggggtttcaccatgttggccaggatggtctcgatctcctgacctcatgatccgcccgcctcggcctcccaaattgctgggattacaggtgtgagccaccgtgcctggcctcaatatatttttctcttactcttccttccccaatcctgcttcctggaggtagccaatgtttatagtttggtgtacatctttataagactctttatgtacatctgtaaacacacacacacacacacgcacacacagtactttgaaaaaattggatgctgttttttttttgagatggagtcttgctctgttgcccaggctggagtgcagtggtgccatctcagctcactgaaacctcaacctcctgggttccagcgattctcctgcctcagcctcctgagtagctgggattacaggtgtgtgccaccacgcccagcaaatttttgtatttttagtagagacggggtttcaccatgttggccaggctgatctcgcactcctaacctgagccgatctacctgtcttggcctccccaaagtgctgggattacagacaggagccaccgcgcctggccagatcctgttttatgtatgttgcttctctgtgattttttttctcctcttataatatcatggatatttttctgtgtcagcttatacccttgtttcctcttttcttcatcactatccacagattctgatatacctacctgaaggatagtcctcatccagctccacctgatcatctccttttaacctcgctcctcggttgagcattacagttgattcttactctgtacagtctcactagccaaggcaatcttgttggacatttgattgttcgaatgtgtgtgtgcattttttcctctacatttcctccttcctttgcccttccctgagactgtggcatttttccttggggaggggaggtgtggagtgtgctcttctggttgagaatcattgaggaaggacatcttgcttctgtgatttcagatttcactgcaatgttgttacctcttgaaacatgttcgcttgaaccgtttgctgttgggtggatggggtttgggagttgggcgggggaatgacctgtttgaaaataattttgggtgctaatttctgggacccatgttcattttctgtctctctctttcgtttttctatcaggaccagtatgttttcctcaatcagtgtgttttggatattgtcagatcccagaaagactcaaaagtagatcttatctaccagaacacaactgcaatgacaatctatgaaaaccttgcgcccgtgaccacatttggaaagaccaatggttacatcgcctaattccaaaggaataacctttctggagtgaaccagaccgtcgcacccacagcgaaggcacatgccccgatgtcgacatgtttttatatgtctaatatcttaattctttgttctgttttgtgagaactaattttgagggcatgaagctgcatatgatagatgacaaattggggctgtcgggggctgtggatgggtggggagcaaatcatctgcattcctgatgaccaatgggatgaggtcactttttttttttttcccccttgaggattgtggaaaaccaggaaaagggagctatgatttttttttccaaaacaatttcttttttaaaaaagactattttatatgattcacatgctaaagccaggattgtgttgggttgaatatattttaagtatcagaggtctatttttacctactgtgtcttggaatctagccgatggaaaatacctaattgtggatgatgattgcgcagggaggggtacgtggcacctcttccgaatgggttttctatttgaacatgtgccttttctgaattatgcttccacaggcaaaactcagtagagatctatatttttgtactgaatctcataattggaatatacggaatatttaaacagtagcttagcatcagaggtttgcttcctcagtaacatttctgttctcatttgatcaggggaggcctctttgccccgactccgcttcccctgccccctgtacatttgtgctccattttttcttcccttttccctcccagttttctccaaagactcttctgttggcaacattttcaacccattggttgggtgagaatggcgactcaaatatcaccttgagaatttctgtgggtgggaatgggagaagcagaggaatcctacagtggcagaaatccttttcttgtccctgtattatcctttttctcatgtctgtatttggtatgaaggattatttaaaggtgcaatatgtgaattagtgattcatgatgttctaggtttttagtaacgttttactcaggttggcattttatgtgtctgtgtctgtatgtgtgtgtgtatgttcagaagcgtggcaatctgtgaacacttcagcgtgaattcagtgtcagattaatccctccttccccaaagtccactggctttcgtctctctctgccgtgacacatatcggaatctactgtgtatatatatatatatatatatatatatatatatatatatatatatatacactaagctctcaaaaacagtcattcctatgaattgaggtgtacaaagtttgaatttgtatcaaagatgtaattattatttttaaaaccttttcactatactgctgctgtaattactttgatttttaaaatgtagattaatttttttttttttgcttcaggtgtgtatccaccaagaatttcaaatttatgtggatttattttattggtacataatctgtaaacttcttaaggcattaacatgaaaagattttttctttttattttatattgtggctcaggttatattttgaagatgttttgagtttatcctccaataggcaatgaagttgacaaggttttatgaaggaataaccaagtccctggagtcctgtggctgttgccacagtaatgtgtcctgctgtaaacaggacaggtgtgtcctgttgagaatgtgagcgggctcttccagcctcctggtccctcctgactctgccacgcccctcacctcactggcacttcgataactgactggacgtgttaatgggtcttttagggttctaaagggtgaaccacacttttaaagccccggctgtggttcggagggttagtgctgtatgccttttatttccctttccctttgaggtactgaaaggatgaaaaggtggtgtcatgttttggggagaatcttacttctcaaatggaaattgcactttttgctgaatcctttgcatttttttggtagtaagcagttcattgagtatcaggtcctcaaaggaatgagttggcccggctagggtgggccctcttgacctaacttcagagggggccttggctcagtaggtgtgaatcagggaagccacattgtcctcagggtgctgtatgaagctgggtgtgggcggattcctcccacaccttcacactggcctgcctccaactcatacagatctcggagcggtcggtacttcattcataggtccctgttcaggcagcagttctgtgggctgtggccctctcccctccaatatgtccgaaaccattgtgatgggtggcaaatcccagggagctcctaagccctgctctgcccacatcactgccacagagaagtcagaggaagggacttgttgctaaaaaatcctttaaaaggttaaatactttaaaagattaaagcaacataactgtaaacatattgtataaaaatgaaaaacacaggaaccctcttcccttccgcctggtgtgggcttgggaaatgggcaagcggccccagcaatcatgggaggaactcttgcgggggagcggtctgggattccaaatgggcaggtcacacgaaggtcacgatgcttctctgcatcctgaaaagggctggggacagggccagtgggggtggtaagggtatttatagcacagtgcttgaaaagggaagattaatgtgtaaatataaaggacacacaggctgggggttggtcagaggcaagaggagggtgcctctgagcttcaacccctcccaggaacaatgagctcaaattggaagagtccagtggaatcggggggatggtgtgagcacccctgttcagtctttgacaattgcatacagaaaagcagctggtatgggtttgggtgtcaatgaaagggccaaagactggtggccagctggtttgggggatttgggccattgatagcatctcccaggaacaacgactttttgcctccaaagttggatctagtgatgatcagcaccagcaggaaatgacatttggtgtctgcccactgcagccatactgtgacctccagccagacttccgcctaattgactccactggatttgtgctctgttgagtcagaggctcccgggggttggggatcgaggggcgggggtcagctatgcagcccatcacgtgtgtttttcatctgggatgaaaaagcctggttctcttttgaaatgcttgattgtacttattgagctaaacaagtcttggtgactgttgttgatttgcctcaaaagttttaagtcctgggttttcagactactgtgtagcagctgtgtgtttaacatactgtagctttttctcccttgggggcacatacaaataggatgtgttgatgtggactctaaactgtaattttcctgtaactattttggaatgatgcatatttctaatgtttgttatacttgtacagagtattgctgttggttgctttttttttttttaaggaaaaaatggcctgaaaacatttttttaaagacttacaaataccaaatataaaaaaatgtcaatgca

SEQ ID NO: 466 - DNA, 74680 bp, Homo sapiens
  source 1..74680: mol_type = genomic DNA; note = NC_000001.11:c169586630-169511951 F5 [organism=Homo sapiens] [GeneID=2153] [chromosome=1]
acctctggtcactgggagctgtgatctcaccaaacccctgccaggaaaagccccagaaaaagcggagggagtgagagccagaggctgctgctgccgtttgcaagaactgcaggggaggaggacgctgccacccacagcctctagagctcattgcagctgggacagcccggagtgtggttagcagctcggcaagcgctgcccaggtcctggggtggtggcagccagcgggagcaggaaaggaagcatgttcccaggctgcccacgcctctgggtcctggtggtcttgggcaccagctgggtaggctgggggagccaagggacagaagcggcacagctaaggcagttctacgtggctgctcagggcatcagttggagctaccgacctgagcccacaaactcaaggtaactcaggtgtggagtccgggtgggcttctctagagaggaaaatctatttcttttagagaacattccctttgcaatgtcatggctttttttttttttaacttcaggtaagtaaatataactaataggagagtatactgaattaaataaactgggcaaatgctaattttgcatccaacaatgtagtttatcattctgagggtttagaaagcaccctatttgattggttagatgctaccttcttttcaagtttattttcaatacagttttgttagtatgtttgtgttggcttatatattggttaattcaaaggcaccaggcacttgctccctcattagcccttcctgcaaactcctgttccagatttttagttgtatagtatttttatgagactcctagttacatattatttattccattgtctacatagcttcatcttctaaaactaaaaatgaacaccttgtgctttttgtcatataattttattgctgccttataaatgactttcaaaatatcatcagttcttgtatgtttttgtactttcaccttttttctgcttcatatttgacttatttatcctattgaatgtgactcttcatttttttttctctctgttcatcatgtcctgggatatggtttaccttggctacttaaaggcatatgtaactgagaggaggtttaattcagataaaatactatccttgagttgcaaactattttttctaattgaaatgttaaaaataagacttctcagaaattaactaaatcatacagtctattcaatatttccagttagttattttttaaatggtaaacctgctagtgtgactcactttttttccttacatcacacttcattatgaaagatgtgttcctcttttacaattacaaaaccaaagtaatctgccaaaaaataatgtaatattttgagatcttttagtgtataatattaacctttttaaaactctcattgtaactgggttattttggagggtattacataccatcttggtcttataataagaagagatccctccttctcaaaaataatcattttaaatatcgtacttcaaagtgataatctaggtcacacccacaccctttgggaactgccgtaagctaaaaccccaaggaaaataacagtccttctaacactaatcttgcctgctcatgagtagaatgcagacttggttgttggctttcttgtagcatgctgggttcatgcttgggagttttttctcttgtctgtagttagcgttgaaaataacaagcaaaataccggaggcagaaccagatagggcaaaggtctgattcacatggtgagtacacagggaaccatgactggtcattctgtcccctcatcctgtgggtaagtttccaaagttctggagattcgttcctctggtaggaattgttgagtcaaaaccatagaaacacaacccagacaaactgtcatattgtttaaccctaaatcatatcatttctctctagcattttcttatgaaaaatctaatccatatatctggctgcttaaactaagaacttgttctaacttgtcctgcccctagagctatgatactcactaggtgaatatcaacatagccaactccatcttttggcaaagtgtattttagcacaaagcagacatctatctacttatttcatataatattagcaggacaatgccttttaaaggtaaaatgtatctattattcttgctccaagtctaaggtgaacactttcaaaaatttccttagaaaacttgtttagtcactcacatgtatacaaagagatattgaagaaaagatatacatacattttccttctagggttctagctttatatgattttgtgattatgaacaaatcatctttaaacaatccttataaatgaaaaactcgtcgtacacattgtttgaattcatatgatctgtaactttttaatcagatagattattttccaatagaaattgttcagatcaaaatagacatacctcagtatgaatacacagcatacatagtaaaaacatgttaggaaacatctctctgttgaaattactccacgtaagagactgatattttttagtaaagattttacaccatcatctacatttctgtattaaagatctggggcaggggaggacaataacttttcaattgtactaaaaataaataaataaaaatggacttccacattagggacattagtatatagaatcctggaattcttaagttagaagaatgctaagagttcatttaattcatattcaacttccacgctttaaccttctacttttcccctttccctcagcaccaatgaccttaccaagtagttgtctaatttctacttgaatgcttccagtgatggagaatccactaccttctctatctagctattctaaaagtacttacgtgcctcctttaattctgcccccacatattaacacagtttctgtattccacatattacaatttgtgagcattactgtaactacagatttgtttttgctttctgagaaaacctgaagggtaaagactaactcttattacatttacaaaataatattactagctaacatggattgagtatttctagtgtgccagctctatgccttttgcacatatcaacttatttaaaattatacaacaattctgtgaaggagatttcagtattaatctcatttcatagttgtagaaactgaggcacaaatggatgaagtaaacttttcaaagtaaaacaataagaggtagatataggcttcaagtccagagatactgaattcacagcctgcaccctagccaccgcgctgtatagaagtcatggcatatgtgggtgctgttatgtcttgattatggctgggccactgtccccacattaggaagcaaaacaaagccactctgatcaactgatttagacatttgcaaggtattttctccaaattctctttccttttaccctcatctttgagtttaagacaaggataagactgatttgcctttagaggtacagaacaataacaacaacagcaaaaacaggaaagtaacccaccactcacaactctccctgttgtctgtcctctctctaattttatttaaaatcatgaatgcagtggtttcacattttttaatcttggttctgccacttatcaactgtatctcttggacaagttactgactctttccaaaacagttttttcatttgtttgtttccaatatgaatcccagggcttttaccccattagccatctctcacctctcaactagaaataaattccaccaaatcaatactttttcacaatgttccccagtagattaaaactatatttgattgatcagttgaaaaacagctcatatatttattcataaaggatttggtcatattttaatcatataaaatctaaacctacagtttgggtttctactgtgatattgggttctttttagaaaattgattctgaggaatgatattagggtagattaacttgtgaacaaatagttatcacaacaggatatttttgaagagaccaataattatttcattaactttacttattgatcatatttataaaactgtggacttctgaaatacaataaagatactggtattctactagaagtctgaagatatgagagatctactttttttgtaatgtgagaaatagatattgaatatgcctttcaaattagtttttgtattttatttccagtttgaatctttctgtaacttcctttaagaaaattgtctacagagagtatgaaccatattttaagaaagaaaaaccacaatctaccatttcaggtaagcctgaaatatacttttttaattttaaagataaatttctatgggtaatttggcattcacatgcatctaaaatatccatttactgaaaatttatagaaacgtgtggttttttttttaagaagtactggctacataatatgtggggcccagtgcaaaatgaaaatgtgagtccccttgttcatattattgaaaatttcacagtgactgcaaagcattaaaccaagccaggggccctttggggcatggggccctgtgaaactgcccaggtcacatacccatgaagctggctctgtttttaaccttgattaaaataactaaataaaacttataagtgtttgaatttttattcattcatctaaaaaactgttattgagtacctggtatgggctgggcattgaaataggcattgtggatgcaatagtggacaagacagtctcatatcctgggttcatggagattatggtctagtttaatgagcatagatgtgccttcgcaaaatgatattttgcttccatttggctccctagattcattcaaaggaactatgtatggctgactcttttgcatctctttcccgtctattcttctgtttatttagtgtgatatatacaatagccataatttttaaagaaaatctcttattttttcctcatctcttcctttatcaagaagactgggttgaatagggttctaatatcttaactatgataccatattccgcagggatgatagagaccatcaagggagaacttcctccagttgaatccccttgtcagtaattcacctgtccctttccccaatcagatgaagacctgctgtctttcccagaatcatcctagtctgtcctgcctcttctgatctcctttaatcttcaatatttagtcaatgggagtcttcctttcagttaaaaatcaacgactaaaccaaaaccaaatcaaaccatgtccagttaactcctatctagaaaaagaaaaaaaaaaatctccccttgaccctgcctgccttttccttttctctcctttccttcactaccagttttctgtatgagaactctgtatcattctctacatttcttcgcctatattccttccctaatctgctttagtatgaataagtctactaaaattactctcacaaaagggcacctaggacttgaggtgccagagcctatgttcttttactactagacattactaggacatttaacactcttcctttctgaagctctcgctttacctgttttttctagtgccacttccccttggttttctcagacttctcttaccactcctgctcagtatccccaccagatattcttccccagggttcgaatctcacccaaaaccaaggctttcactactacctacccagaagccactttccctctgaagctacattgacaccccctcaataccagcagaattaaatcttccctcttctatacatccccagtaccttgaattaatccctaccttctaaagatattaagaggatcaattgagttaataagtacaaagtatttataatgatgctgacacataataggcactcagtagaagttagctacattattgttattgttgctgctattactaatcataacttagatcatatatatcatagtattatggatatctatatatctatatttctccactcatttatatagtcttcacatgtgttcatttatatatttatttaattttaaacagatctgcatttaaatattcttttatttttaaataattgtgtattgaggccaggcgtggtggctcatgcactttgggaggccaaggcagatggatcacttgaggtcaggagttccagaccagcctggcccacatggtgaaaccccgcctctactgaaaatacaaaaattagttgtgcatgatggtacatgcctgtagtcccagctactcaggaggctgagacatgagaatcacttgaacccaggaggtggaggctgcagtgagctgacatcgcatcacttcactccaacctgggtgacagagcgaaactctatctcaaaaaaaaaaaaacaacaacaacaacaacaaaaaagtatattgagaacctactacattctaggctctgggataaagtgaataagacatggaccttgatttccaggagccaatcagctattggggataacctatggatagacaagcaatgacagtagagtaataaggaagaactatgatgaggattctgtagtaggacataggagacctatctccagtctggtggtcaggaaagtatttctatttctagattgatagctgaaaaaagagtaggatcttggaaagccaagtggggaggcaaggggttgggtgatagatgcattttaaaccaaggcacagaatgtttaaaagtttggaggtgagagtatggtatatttgtggaaccataactggatcagcacagttggaccacaaacttcagggaaggaattaacaagagatgcaactagatggggatcagggatccatgctaggctttatattgagaggaatagggagtccctaaaaggatttcagcaggagaaatatttgtcctttagaaagattatgttgtccaattatagagaatagattggagaaagaccagtccagagccagagaaagtagtcatgggactgttgtatcaatccagatagcagagaagctgagatggagtccaaagatatttaggagctaaagttgattaaacttggtgactcattagatgcagataatgaggaagaaaagggaattgttatggacttcaaggtgtctggtttgaacagcagaatggatagggtgccattcagtgagaaagaaaatgtaagaaaaggagatagtttgtgagagaaggtgataagtatagatttggagtctgaggtgtgtatagaatatctacctagagatgttaagtgagcagacgggtgtagaagtttggccctcaaaagagagatctgagctagctgtcaacatttgggagacatcagaacaaagatggcaaatgaagaatttagagggtgtgaactcacccagggaggatgtgatgagaagagaaggctgcagacagagctcaaagtagcagcaaagtccaagggatgagccaagaaagaaaagtttaccaaggagcttgagaaagcctgttcagggaggggagaagaaatctagagaatgtgttatcctggaggcaaagggtcaaatgctattaatataagggtcaaaatatggtccctttgttatggaatagtgggacaagaccagatggcagggtgttgaggagtgaatggaaggcgaggaaactgaagcacaagggtcttatagataactcttccctgaaacttggttccagatgggaggagagacagggtagtttcgggggtgggggtgggtactgaggagcttaaggacatttgagaattttataaaaaggaatacagagacttaaatatttaagggaagactctatagaaatgccatgaagtcctttccaatagaaaatgtggggataaaacatctgagagagaatgattaatggagacttagaagaagcaggaagcattgggattcaaaccttgggctggcttggccttaggtagaatggctaccaccttcatggggggccaggaaagcagaggataacgttgcaaataaaattaagtttgtagttatgagtaggaagttgaaggatgtcctgtcctatatcacagagtctattcattttcatagctccagctccaagcttagcatgtacaatagatacttaagaactatttaattaaattaaattgtaggtagatgaagggaatataaggtgggaaacatactcattagggccaggaaaagaggattggggccggtatttgaaggtgtaccttttgtggcttttgccaagctaagcaaattttaatccctttgctgtgtgagacattgtgctaaatgccataagagacggaaaggactaattccaggctgaagacttttaaacaataaaaaggcatggatagcttttgaagaaaagggttctgtgatcaaagtcctttcagatgattaaattttttagtgatttcctgatttaaccttgttagaggtagactctgacagttggtgagaacagtctccaatttatgtgtaaggcctttgcacctttctgtcaacccctgtgtatctcagaatatatttgtttcatgtggacaaaggtgtttcgacgtccattttaatgtaatctcttcctgaatgtccaaagttgcttaactatgaacttatgaagtgcaggagtggtatcttattcacctttgtaactctatagtagttgatacaaggaggcaaatctggcgtgaaggaaaagccttttattttgactgagaagatctggatttgaacactgccattaactatgtggcctctcccattccccagactagtcctgtgttatttgtacctttcccctatgtcctgctccactcatctgctgggtgtgattctagctgagccctgaaaaagtcatgagcctcactcctgcagcatgaactattgttgttgttagttcttgtaattgtagggggctgggctgtaggattggaggtatgaagatgcccatccaataaggtttgtggacatttgggcaggtgagggagtacagctggggtcatttttaggaattctgtcttgggctttaaaatggctagtcttggctgggcatagtggctcatgactgtaatcccagcactttgggaggccaaggtgggaggattgcttgaggccaggagttttagaccagcctgggcaatgtagtgagactctgtttctatttaaaaaaatacatacatatatatatatatatatatatatatatatatatatatatatatttaaattagccagacatggtggtacatacctgtcatttcagctactggggaggctaaggcaagagggtcatttaggacaagagcatcacttgagcccaggagttggaggctgcagtgagttatgatcacaccactgcactccagcctgggtgacaaaataagacctcatctctaaataaataaataattaattaaattggctagttttgagtctgcatatttttcagggacaaattataaaatgtttgtccctgaaggagttttgaaatagctgcaacaatcactaccttgtgttatgtaatgcattgttcacctaagagcaggggattggattagttgaccttctgcagtcctttccagttccacaactgcactaaattgggtacatgctgtgctggcttccccaagccctgaagtaggccactcctttccccaatccagctttgggcactgaggagagggttagaagggttttaggccatctggctgttggaggagctaaagagcagcttgaaaaccatttagccatgtgttttcctacatgcgtgaaagtatttggtatgcatttatgaaaacatccttttgttttgccttaaatctgaagaagcaggaggggaggttgaataaatactccaaactgtccactgaagtaataggtcttattaggttaaataacttaggagactttctctgggcatctggtatttgcaggcatgtgatgccaacaaacaaatcaaccaagcaagagaaccatggcaactaaatgcggcacacaattggcagcatagtcagcaccctgttgggctcattggcagctggggtaggtgggaatagtcagtggaaacttccatcaggagccaagacagagggtagcagctggaagaggggggtcagtcagtggagtccgacatgtcaggagtcaaaagaggtgtagacatctggactattctataaagatgggggcctgagcctgccccgtggaaggaatagggagagctttggctcaggagtccagagatctgagttctgatcccagcaatgctaccagatcactgactgaccttgggcaagtcacctttgtcccccgattcctacctcccaggctttgttaactaaaataaggactgaactttgtgacctccacagtcctgtgtaaagctaacataaaaacaaacaaaaagcttcaggcacaagatcagaataaactccaggagtaggagttcaaggaaaggaataggacaaccgtgggtggcaagacaggggtagggaaagataggacctctgtcccagaaatcagagtttaccattgcttctgtaaccagttactgcaaacttagtggctaaaacaacacaaatttattcttttatgattatatatctgcagatgagaagtccaaaatgggttttattgggctaaaatcaaggtgttggcagagctgcattccttctggaggctctgggggagaattgtttccttgtcttttccagttactggaagctgcctacactcacgggctcatggccccttcctccatcttcaaaaccagctgagtagcatcttccaagctcttcctaactcagattctcctgcatccctctgataaggacctttgttattacatgggatccacctggacagcccagaagaatctcatctcaagattcttaatcatagatacacagtcccttttgccatataaagtagcatatttccaggtcccagagattaggacgtggacatctcagcaggggcacattattctgcctactacacccaccaaacaaagccctcccacggtgtcctccatctcagagaatggcaccctcctccacccagctccccaaatcagaacctcatcagccatccacagcaactgatgtcctttattctctaccccacatccaatccatcttcaagttccaactattttatctcataaatacatcactaatatattctctcctcatcatctcatcataatctcagtcaccaccatctctcctggagtcttctatctgttctctcaattgttctctgctcagtctcctccgagatcatcctccacaaatacagccagagattttaaaaccaaaatctggtccatgttgcacccctgatgaaaactctttaatggcttccagatactcttaggctaaagggaaaactctatgaggcttacaaagccctgcatgatgggactctgaggatgccttcggcttcaccttctgccccttcctttcacatactaagctccacctccccactggataactgtcagttctctaaaaaggccacattttctggcacctcagggcctttgcgcacgctactctaactttttagaatgtctttggccatcccttttcctctctgcctttggacctcagttaaaggattaattcctcgggaagggattccccaactcacctccaattggactagattccactgtcaaatactcttcagagtattccctccttttctgtcataatatttaccataggtttaaattgaatgtttttgtgatcatttgtttaaaatctgtctttcctactataaaaacgtataaagttatagaactataaaaatgtttgacttttataaactctatgaaggcagggagtgggtgtatctattttactcttttacgcaccattgcaattctgatgcctaggataatataggcacttgatattcattgaataaataaaggaatgaataaaggaatgaatacaaggtggaggtgtagtataaagaagtggcttaaaagtcacgatctagagacagacatattaaactttaaatcatgatgctgtgtgatattaggcaagatatttaaactctctgaggctcagtgtcctcacctataaaatgaggatcttaatatctaccttaaaaacttgtgaggattaatgtagggacttacagtgcttgaatgtattaagggaaacagtacaggaaagccttattatgattatcatcaccactgcaaacaaatgctggctgaactccatgagtgccgtgacttccttctcctgcttctaggacgcctaatggcgagaagccaatcccatgacacttgtggatggctcagaaatgacagtagttgatttctgtcacttgtctggaatggggcttttggtcatagattctcaagatttcaaagacatcaagatcaccaaggagcacacgttaaagtccagattcccaagtttcacctccagaactcagattcattgaggctgaggtgatatttggaaatctgcctcttattaagaccctaggtgattctgatgcagagactccaaggactacactttggaaattctagtacagtcatcccttggtatccacagggtattggttccaggactactcacagataccaaaatttgcagatgctcaagtcccttatataaaatttcatagtatttgcaataacctatgcacatcctctcatatactttaaatcatctttaaattagttataatactgaatgcaatgtaaatactatgtaaattgctattatgttagagttttatttgtattgtttttattgtttattttttattgttgttttttgaatatttttgatccaaaattggttgactccatggatgtgtaaccatgaatatgaaccatggtcatggagggctgactatatacaattcctcaaattctgactcagccatcaactttttccctaactccccagacagaatttgtgcttcatcctctcttcttctgtaatattttgcccatatctcagcagtcgctcctatcatacatctatctccaaactagcttgtgagttccttcagtacagggactgtatttgatccaggtagccagaaactttctaacacagtgcctggcatgtagaaagtaaaacctcattcttgatttctgcacccataacctcctgtctctgctgtgttctcccattgcagtaactaataacatcatttacccagttgttctgataaaacaccttgaggtcatccttgacttctgtctctcacaagccacatgcaatccatcagcaagtcttgtttgccttacctacaaaaatgtccagactccaaccactactcatcacgttctgctacatgtgctggcccagtacactgcagtctctttcctatactgcctaatctctctgcttccattcttgtccctacacagactattctctacacagcagctatgatgaactttttgttttaggatgaacttttaatacacgttatactatgtctctgctgtacaaagtggtttttcattttacttagaaatgctccatttcacttagacgaggcgtggtggctcacacctgtaatcccagcactttgggaggctgaggcgggtgtatcacctgaggtcaggagtttgagaccagcctggccaacatggtgaaaagtcatctctactaaaaatacaaaaattagctgggtgtggtggtgcatgcctgcaatcccagctacttgggaggttgaggtaggagaattgcttgaacccaggaggcggaggttgcagtgggtcctgagattgcatcactgcactccagcctaggagacagagcgagactccatctcaaaaaaaaaaagaaaaatgctccagtgatgtcccatttcacttagaagaaaattcaagttcttaccgtagcccatagggcctcccttgttctacacacctaccatccacctcatctcttctttcttcccgtactgtttttcttactgttccttagatacatcaagactactcctgcctcagagccagagagctgtgtgatttggttcctcaattcatctaggtctctgagcacacccatgtcagagaaatctaaagtaactaccctctcgcatcaccctctgtaattgaaatgaacatctttcttaagcaaagaaagttattgctaaggaatgacagtgggtcaaagtgggcaagacttggccagaactatttctcctactctgttgacttcttttgggtccaggacaagtgtttctaccattctattgtgatctgtgtacatgtaatgttgagttaatgagctgctaaaaccttctagattgaaaataagtgagtcagcctcaggaccaggaggaatggtagcaatcactcttggtatcatctgtttgtttttcttgcttagcaactctgcctttgatgaccctgaatacagacatagtttaaatatttgttttcacaggacttcttgggcctactttatatgctgaagtcggagacatcataaaagttcactttaaaaataaggcagataagcccttgagcatccatcctcaaggaattaggtacagtaaattatcagaaggtaagataaatctaatatttttctgaaaagggaaaatgtctaagtctttaataccagcatcaacatttaaaactatactgttaaccacgtgttgttagggaaatctcttgcaactggtaattataaaaattgttgctgttgtaagttttgagagaagaaaaggaaaaggttttggagtcctctagacctgcatttttcactgggttcttactctttaatgtttgggagggcaagttatctaatttctctgaattctcatatgttcatcttaaaatgggaataataatacatacattgaaagatggtttaaggcgggggtcagtaaatttttccgtaaagggccagatagtaagtttgtttggctttgcaggccataagatctctgttgcaagtactcaactctgccttttagtacaaaagcagccatagacgatacctatttttttggctttggttacagatgccagaactaattaactttgttaccgtattctttccctcaagtcatacaccagagtaagaccgcctctgacaatacaattttatttacaaaaacaggaaattggttgggtttggcccatgagccactgacatagtgacatagaactagcctgatataggcttcctggcacatagatgacactcaataagtggtatttggtggtggtgagactagaagcattaatagtattagacttttggacatagtgaagtggttaagaaagtaagctttaaaggcagacaagttaaaattctagctttatcatttctgattctacgactttagcatctctgagcctcagttttctcatctataaaatggaaatgattataaccacccataagattgcctgaaatttaaatgaagtcacttaggtagagtactaaacatggttcctgggatcggataagctctctataaataatgatgacaatgatggcaataatcataaagataatagtcatgcaagttattgtatcagccgctgaatagtaagtacctgatgttaatatggttctaattatcccattatgctgatgttcagatcattgtaagcatagtagagttccatcaggcactggtataaaaaattgtatccatattataatagttgttggtatgagaacattttaaaataatttcagacttttcatggttcacatttaaatatctttccttctacatgttccagccatcatacctttgagagaataattgagtaggagagtggtttatgtgcaggttttagaactagactaataagtgcaaatcctggctcagtgacttttatgaagttatttaacctctgtgtgcctcatctttctcatctgtaaaatggtaataataatcatgtctctgtcatacaggtttgttgtcgtgaaatcttagaataatgactggcatataacagataataaatattagccatgatagtaaagataattcttcaattaaaatgtgttcaaataatttagtatttatcttaaaacttgttagtttcagaaaaaatcagaaagtaatttttaaatttattgttttctatataaactgttgtcaaactcatacccactaaggtataagtgactgataataggtcaatgaactaccttccttaggagtacttgcattagcacttaatctttggcttgaggaaaaacaatgaagcattaactgtggcactgagatttcttccaaagtgaatttggcaagactctgggtgaggtagtgggaacaggagtttctcctatgttcttaaaatcatacagtgacatagtgaacaaccacttcacctacttatgaggcttctagacgactgcatcagaagttcagcaatgtaaagaagaagggggagaaacctcaaaatatcaaaatgtcacatgcaggtttcatttcaaataagggaggaggtaagaattgtagactttggaccctacctgggctgtttgcacagtgaatgaaccttgcaacactatccctcttcctttactgtttatttgtccctacattccctacagccagcaattatttatgagcaattgcttaaaatgctcccacagctttcactggagacatgattattggcatataatattgcctctggtcctatgaatctaagaaaggtaaatacatattggtagggaaagtaaaattttaccttggaaatgagatgcaaacctagtaagcagatagtatcttttatggtaaaagacaagccttataagttgattttattatgccctctgcattaaaataaaacatctcctcctccatgtctgacactcaccctcacctatagcctccctctgtggtttgagctatttttttgggagtggggataaactaactgcatgctgagccagttacatgagaatccagattcctctatctcagaggtagatatttgagagataggtggtagggggttaagatagtattacactggcttgagaaaccacaacagaacataagagaactctggataaccctttttgacagaatggacaaacggtgatttgtaaaaatgcttgtaaggacatttcctttaataatgtatttaataagactgtcttagatcagggaataaagtatctgcaactgtaactaatcacttaaaagctgtcactaaagggtttcaatttgaggttaaattttcagaaactctgtaactagcatgcatcaaattgacttcaatgctgcacctttgagcaaagtttgttgttcagtaaaattttcaaagtcgttttggtcaattacctttaaaaagcttgtttcatggagaatttaatattattcttttcttttagttatattctcatattttaaatatatgagttgcatatgaatgtgatgtcacaaaattagttctataatatatagccatctgctggtaagccagctctccaaataaaacacgttttctgccagacattgttcgttgtatctaagtgttgccaaattctctatacaaaaatttgctcttctagatttttccaaaacattccaatgcttgacttaatgtaggtgattacattttttcacttctcatctgaatattttggccttatgtagagacttccttgagtatatgataaacacctgaaacaaactataacggctatagtttgtatatttaataaatcacaaaaatgtggatcccttttccaaagagacttgcaagtcctgtgcaatgaaatcagctctttataaaacgtcagcattgattcgcccattgcctacattatagcttctaaaagaatattctgaatctttgaatgtagtgaagcattcactaagtttattaacttaggagaggaaaagagttgttcacaaaaataagtaacaagggaagagttactgagtgagcaccctaatgagtaaccaaaaaggctctttatgtaacttcactttcccaaagcttgtatgcaccatttttcatttttaaaaaatactgagagcctttggcaagtaattagtacatcatgacaagaataaatacaatacaaagctgactatcgactgagcaggaaatgaacagaactgagtaaatataaatgaagagctacccttgtgtaaagattttattccagcaagcagctgaacaaggacttcttgtgctctagcacaatagttgtccctgtccatttctcttcttttcagtttagagcttaattttttttattttgattacaaagtcaaaatcacattcaccaaaactgcatctcacaaatgcttcctcttaatagctgtttgtattttatactttatattaatgtatgttgtaaaatcaaagatacaacaaacctgttttattctagactaaaggtaaaataatttgaagtgaaaagaataaaagcattgataaaattacaccccaattgtctcattagccatctcactcagtgtaattatagaatatatcctatgtacaagtctatatcattcactgtttcaagatgctcataattcaacttttagtagtatactaaacttaattaacatcattcatttaattatttgaaattcatcttatatgtaactgacaggcgaatgtgaaattctgagtaatttagtttgatcaattagacagacattaatttgtgtgactagagtaacctttcattatctatctcaaaatatcatgtacacaagtatatacaataattttttaagcccagtatgtgttaaaataaatctaggtgtgaaacattgattgtttacagataggttcaatattgttagaaaatcagtcaccctgctatacctagcacaagtgttatagcatcttgggcaatttttagatacttacattggttggttctcattccagattgacagtgtgttctaattgtagccctagaagaaatctagaggtcaaacctatcacaattagggcaccaacatgtaccctagagttaactaggcagagcccctcaggggcccaggccctgtcttctttacatttgtactctggcatttagcacagagcctggaacctagtggatgatgatggtcatgatcatgatgatattaatcattactgaactaaactgaggggccgaggactgattagaaagtaaggactatgcattatttttcccttgctttaaaattattgattttgctgataattttgagcaggtactttgtcttacttattaccaaaaaaaaaaaaaaaaagtacttttaccaaaaaagtcttatttactttcatcgcctttggaatagatacatcactacaatggattggaagtttgtgtcctccaaaaattcacatactgaaatctaacctccagtgtgatggcattagcaggtggggcctttgggagatttttttttattatactttaagttttagggtacatgtgcacattgtgcaggttagttacatatgtatacatgtgccatgctggtgcgctgcacccactaactcgtcatctagcattaggtatatctcccaatgctatccctcccccctcctttgggagatttttaggtaatgaggatggagccctcatgatgagattagtgcccttataaaagggaccctctcactcaccctctttctaccatgtgaggatacaaggagaagatggcagtctacaacctggaagagaccctgcaccagaacccaaccatgctggcaccctgattttaaacttccagcctccagaactgtgaggaagaagtgtccgttgtttataagccactcaatccagggtactttgttaacagcaacccaaactaagaaaatcaccaatttctatcttactcacatgtgttaccagaactcaagcacacttaagatctatcttatctaaagtagaacataaaggaaagaggctgtattaattgcaacatgactgggaaagaaaatacttaaccaaaatgtgaacatgtattcccacaggctatcagagcatttgttaggagccagaaattttacaaatattttccagtcttcataacccatcaaaaaggataaagttatctctagaaaaaggattatattatcttaaattataaatgaaaaaactgaggttaaagggacttcaagaaaccttcccaagttcccacagttagcaaatgatacaaccaccaagatattttcaactctgaccctgaagttcaagtgctttctcccactatctagcagaaaaaagtatcgttaaccatatagtctcacaaatactgaattacaaatggcgatgagtgctgtcaaaaaaccaacaacaaacaaacaggtatcacaatcagagatcaagaagggtgtaagatgatatttgatctgacatctgaagaatgagcacacatttacccagaaaaataaagggaggaagaacttcaaaagttatctcctaccctgcaaagaatataatgttttgcccttaggggagcttgtgaaggcagtggaaagaatatcattttctactatagaaaccccatgtgatgttttaacagttgaaacagtggaagctgcctgtccagaaacatcatttttcaactttatgaggccatgtagcaagaagcattgaagaagggctgtcatgcttgattcaaggtagatggtgcagctcatcaactagccatgctaatttcagttaatagacaagttctgacctgagagggcaactctccttatcagtcctgtttgtgctttgttaccaaagctcttttgtaatctttcacagataatgcttcctgcttattagtggagactttctccataaactttttttcttttatagactagaattatgttataacttacaggaagtgacttaagcttttatcatttctcagctcttgacagttttattatcaaagtgaaagtacagcctagagtaaatattagttattagtgtcaagctatcctttggggtgtgttgggggaagacacaacaaagtccactttatgctagcgcaaagttcacaaactcagatgcctatagtagccagataagtagttcagtgaacaaaattggtccagtaagaactgatcatcagaaagcagaaaagggcagctaagatccagatccaacaaaattctgtgcaggagtttggtcctgttgttaaccagatctccaggtttttgttttttaaagagaaaccagtaatccaaattcttatataatttctccggatgtttaatgttggcatttaatctattttaacattacgcaatcataacaacacacagccatgagctttgacttgttgacctaggctgtagcccataggaccttaaattttaggagtttaataaatattcactgagcatcttcttcatgttcatgttccatgcttctctaggtacctatggaaggcaccagagacactaagacaaatacaatccagcacttttccttgaggaactcacacttgggtgaccaaaatgtgcaggacacaaatacttatgatctagtagaagaaaatgaattagtcacataatctcacaggcatttaattacaaattgtgatgggtgctgtaaaagaaaaaaatgtgtatcagaattggagataaaggtagaagtgaacagatattcaaggtgatgtctgaatgatgagcacatatttatcaaaaggaagacgggaggaagagcactctaggcagagggaatggcatctgcaaagaccctgaggtaggacagaacttggatgtctggggaactgacaggggacccaagggacaaggagcccatagtaaacaagagaaaagacgtatgataagactgaagagagaagtagaggtaaatcatacatggacttgtggtccacgttaaggactttatgcaagaagtaaatctagatatacctactcaacttatggtttccatgctcagaacctcatgagatacattgcacgttactgtagtacctgaatccttcattgctattgaatggatgtgccttattttccactcccacctggagaatccaaacatatgctgatgccatgcaaactcatgcaaagcgttttgagtggaatagattttccacagttgggatggggaaaggtacaattaaagaagggaagctgacattgctgtaatgtaaaaaaatattttatatggaaatttagcatctcagactttggcttcagaacataaggaaccagatttaccctttttctcaacaactagacaggcagacaaaacatataaaacagaagttttcagacatcgaatgacagacaactcaagacagtaaaagaagagtaacaaaccagatgtgccctatgagcacctaagcttactgcttgaagagtgtttccagggaacagcacaagcagggagaacccagacagagtctctatgggttgaggaaatagagtttggacttcggagaagctcaaatggctagaatttgtgattttagggcagagtcctgcagaggacagtataatcacagagaaagagctctagagaatctacagagaggttttgtcaagttgaatactgatctgcacatacatgtgaggaaagtactgagggtaagaaaaatgtcacttgaaaggaacaggtggaacagtccctggaccttactcagggccggtaatcgtttatgttcctaccatcaaacatagaaagacctcctaataaatgagcactggatagaattgtcagaaggatttagaaacagtgggtggataaaattagactacaggctgctgaggaggcaacagaataaaaaacaagatttgatttcaagtatcttaactgtgaataaaactcaatactagttaacaagaatgcaacaaacaacaatgtaaattcacaatgttaataaaaataaacaagcattagaagaagcagaaagagatgactcataaccaagaaaaaactcaacagattgagaagtgaaagagagaatagaagcagcaggcagagacagtaagacagctatcataaatcttctcaatatgttccagaaagcagagaaaagcatgagcatgatgaagatagagaatataaatatgcatacacagaacttctgtagatgaatacaattgttgacatgaaaagtaaaaaataaagcatagaaaagaaaggtaaaaaataaaggataaaaaaatatattataaactgaaggataccactaatacaacaaacactggatgaaattaatagcacattagacactgtgaaaggaaatagtagaaaatattaatacattgcaatagaaactgcaaagtgaaatacagagattaaaaaggctgaagaaagtgaacagagcatcagtgaactgtgggaccatatcaagtgatctaacatatgtgtaattggatcccagaagtagcaggaacagaaaaagtatttgaagaaataatgactgaaaaattcccaaatgtaatgtaaactacaaaccaacagattcaagatgtttgacaaaactaagaagaaggaacatgaagaaaaccacaccaagccacatcactatcaagttgctggaaaccagtgataaagagaaaatattggaagcagtgagagataaaaacacacaccacatacaggggaacaaaaccaagaaatgatagcagacttatcgttagaaactatgcacaccagaagacaattagggacatctttaaagtgttgggagggtagaagataggggaatctgtctgtttagtattctataccaagtcaaaaagtcttttttaaatgaaggcaaaataaagagtgttttagacatacaaatgcagaaagaatttctcactaacagagcagaaaaaaatgttaaaggaactcctttagatagaagaaatattatgtcagagagacatttagattcataagaaggaatgaaaagttccagaagttgataaatatagagaaattttttcctcgttttaatctattaaaaaggcaattgattatctaaatgttaaagcaaaatagtaacaatttattgtggggtatattatgtatatataaataaaatgtatgacaatagcacaaaggctgggagggaagaaatggaaatatattattgcaaggttcttacaagtgaaatagtataatattatttgaaggaagtttgtgacaagttaaaaatgtactatatattgtaaacggaagggcaccactaagaaaacaaagctaagaaggcaacaatggagattaaacatcactaactatactcaatccaaaagaaaacagaaaggaaggggaaaaggaataaagaccagatagacaaatagaaaataaatataaagatggcagttttaaattcaaccatatcatcaattacattaaaagtaaatggaaagaacactacaattaagaaacaaataagattgaataaaaaagcaatgctaaactgtatgcagaatttaagaaatccactttaatgagagagacaaagataggtaaaaaataaaggatagaaaattatataccataccagctaacactaatccaacacaaaagggtgtgtaatgatgattccattgatatgacattacagaaaagccaaattatagtgaaataaagcagattagtggttgtctgggcccagagggcattggctacaaatggcatgaagaaatgttttggaatgatggaactcttctctatcttgattggaactatagctataagactgggtaattgttttaatcaaagctcagcaaatattatacttaaaagtggtaaatgttattatatgcaaattatacctcaatgaggataatgaaaggaagaaagagagggaaggagggtggggaatagggaaggaagaagacaaagaaaggaagaaaggagaaaagaaaagaaactaggaaaggaaaaagaaaagaaagggaagagaaaggaaggggagggaaaggattaatcatttcagttttcaaaaagtgtagttgcttcagtaagaggagttttattggccttttaccccatcatgtaaaacatttcaggcttttttccccagatccttgttgtctgcctacatccacactgatgttctcaccttcttctcgtaaagaatttatcaagttattgtaccaaacaaaaataactgcatcccaaagagaaattctgtcaccagctgatgatagggaatctttcacctaattaaatgaggaattcctcaggcagaggaaactgttcattccacttggctctctatggcactcacctctccccttcctgacctcacttgctccattttattattgaaaacctcacccaaccctctacacttcttttaatattgagtatctcagttccttctcttcaataaagaagaccaatttcttcatcctctccctctcctatcagtagggaaagtccaatatacatggaggtgttaatgatgtgtctttgggtgcacaaagtacaaagtaagacatctaagtttcaggggatggacacatttcatattcatacagacaaccagcctgcataggggagttagacgctgtggctcgggggaaaaaattgagataatcagatggctaagatgaaataaagagataaaacaaagctgaggatcacagcagttggaaagaagatctgaaatagcaaaacaaaataatacataaacagctctgactatcctcccatctcatgttaataggctaagtatgtcttattaaacaccacaaagaagatatcacccattcttatattctgagatggtttactaatcaaaggcgattcaattctctgattatatttaaataataattgttcaggtaccctggaaaattaacttgctaaactttaatttacaaataacatttgttattcttaagatcaccatgttatcaaagcctttgtaagtacatgagcatagaaatgggcatatgtgaatctttccaaataataaaagttcactattgaaggacatatgcatctccagagaactcatcttagctatccccagatttgagagtggtgaaaacgcaatcctcagaaactgcccacatgtcttgatggctgttactcctccaggtgcttcttaccttgaccacacattccctgcggagaagatggacgacgctgtggctccaggccgagaatacacctatgaatggagtatcagtgaggacagtggacccacccatgatgaccctccatgcctcacacacatctattactcccatgaaaatctgatcgaggatttcaactcggggctgattgggcccctgcttatctgtaaaaaaggtaagaacacccccaccaaaagattcaacaactaaatgttggaatggtcaggagttctgtcatgggacaaagcttgggagcatcttggtaacttcttgtacatcaagcagaggaagacggcacggagaccagatcattgtttgacaagagaaaaaaacacctgctatttcagggtgtggatccacctctgtttcttctcattcctccttcatctcagtccttaaggttctcccaggcaaattcctgtttgagagtatgttctgatgtcatgcttgtatgatctgtaacatttacctcaaggccaaagtcttttagaaagtatacagtagcctatactctgctgaaagagctcttggaaagaactttggctaacatgtttgacatatctgaggtttgggctggtaatttgctctataaacacgtgaaatgccagcttcctttcttacaaacaagttgaaaactttgggtggtaggtttcaaacacactcaagtgactttacaagaacttttattggctgggcttcttaggagcaagcttggattttcattttatcccatgagaatccagcccatctttcattaaaacaaacaaccacagtgagccacagcatgggaaataacgtgatggactcaccatctgcctatacatacacgctcaggccatacctacatacatgcccaatgtatttactcattatacaaagactttttttccatttcctggtatatataagatactgtgatggtactgaaaaaaaccttaaaacttacaaaagactcttcttgcattttaccatcagcagcatgtttttctcatagtgagaatggattaatgctgatacttccacccaattatctaatgccccctttcatatacaaataagatgacagcattaaacttggggcatgatgcttttaccaactgagctaacgtatctatatactcttctattgagactgggggaaatggatacttgtacagagtcttgagagtcaccaaatgttttcttcccaagctggatgaaataaagcctgttccccaaagcaagaaggtatcaaagaagacagtgtggcaccagattttaaataaccctagaaccattattacttgataaatatgctattttaaaaaataagaatttcttcaagttgaaatcattatggttgattgcttgccctaaactctttgctatccaggaaagctaatgagcgtcttctatctgcagtgctactgaaaacatgtctttcctttcatagggaccctaactgagggtgggacacagaagacgtttgacaagcaaatcgtgctactatttgctgtgtttgatgaaagcaagagctggagccagtcatcatccctaatgtacacagtcaatggatatgtgaatgggacaatgccaggtaacacgagggctgtgtaccattaaacaacagtaaaatcattagtaatttttcggtcctgttttcttcaaagcactagagaagttgaccatactcactgttttgcaactccctatcaagaaggaaatattttctctttttttttttaaacaggaaatagaagagacaaattagaagctagagaagaaatgtgcagccttgttaggtatagtgacctgagtaggtttcaccttggcctgtactttgaataagaccttaaggtatcagctcagccactctctccgagttctgcagttcctctatatgatgaccatggcttcttcaaggacaagccctagcaggaaggatcagcaggaagattgcagtaaagatgaacagattaggagtaatcctcaacacacaaaaaaaaccagcatttcaaaaggtgacagaagagtaatattcagtggcatctagaatattttctctttccatttgcatttgggcacttatgagaaggcaaaatcatagcaatcgttaagagaaaaaataactaattcccacttagaccacatctcttctatttctctctggtagaactgacctacaactaaagatccagggtatatgatactagcctgagggaaaaacattaaaaaattaaaatgccactttactaaataaaccatatttcaaaacactaaacttcttagaggttattctctaatgccatctgaaaatcacaaatagcttcacttactaaaacacaaatattgttaagagttgagatctgggtagtgtttttaaattgtattctatttcatttgactacattttccacttggttttctgaaaatatactcatatgactctcaatgttgatcccaagttccaatactaggagcttgtaaaaactggggcttagttaactgacctcgaccttagataatctgagttcagacttcagattatcagactaccttctgtggccctggataaattagttgtctcaatgtgcttacttacaaaagtggactaaccatttatcctaacatctatttcctggcagagtgaacaatctgtataagtatatggatgccaagaaaagcaaaaccatatgcacaaaaataaaaataaattgatctgagcttagagtttacgaatttatagttcccaaaagaataattgggggtaaatgggacaaggtagggaaagaccatcagtagaaactaagaatagtaaacatttgtaaaaaccctctgccttataaagcagaataaattgaatacatatgataaatgctaacacagatatgttaattgctgaactcaatataagcatttctttggcatggataaacgcttccaccaaagcctcctagtgatgcaaggaatcctggctttgttgcaatggtctcctaaaaaaaacaagcctttgtgtgggtaaggaactgattctcaggcccattatctagtatctagtgattatgtatctgagatgtaaaacagaaacctaaaagccaaggatggagtctccccacagagcaaatgagcattttcccagtgactgtaggagcaaagaaggagcaaaactaagtttttatattcagttatcactactccttccatgaaaagctcccaatggctcagcataatgaggacttgtacactgcattttaaggagagtgtgtaaccccaaagtgatttcgttgacttgtcattaaaacaatcaaaaagtaagtaaaaataacaattgaaaatcctcatatcatcttcacatcttcttcccttaggcagagcttcgaccactacagctagagagctgagaggattaagtgcttgaactcagccctattggcggttctggtgatttgactccctccagctgagatcagactggggtgaccaaacattccattttgccgtggactttttaccagttctaatagttaaagtcctgaatcttgggaaacccctcagaccagaacagtcggttaccttcttggttcccttcttggcctaatcctttagcaatccctgtgtttttgagttcacatccaccatctctaagctctgttgttacctgtataatgccatttatcacaatgagttgtcactgcttgtttgctggtcactcagatgtctgcttttgcagggcacaaactacaactggagtgtctgttccctcaaagctttatacaatgcctgacacacagcaggtgctcaatacacttggtgagtgaatgtttgatcacagagtacttgactgaatgcttattttggcctgtgtctctccctctttctcagatataacagtttgtgcccatgaccacatcagctggcatctgctgggaatgagctcggggccagaattattctccattcatttcaacggccaggtcctggagcagaaccatcataaggtctcagccatcacccttgtcagtgctacatccactaccgcaaatatgactgtgggcccagagggaaagtggatcatatcttctctcaccccaaaacatttgcaaggcaagaaactctcctgacagtcttgcttctcaatgcagaatcctttcttcccatgcactaactccctctttctcccttgccctttcaagccacctgcaccgcagacaaactttcctcagttcctaacaaccaaacttagatattttgctcttagatttataacttgctctttggggatggagaaagcgaaggaattggcaaaggttttttttttttttttaattaagcaaaagctaaagagatctctaacttcctcgaaagaagaaaagaggaagaaaacaaatgcatacatagagatattctttcttcgggttacttcatatgcaaaaaagacctagatgctagcacaagacaaactgcaaatttacagaagcactaagttgtagaaagtgtaaaagtttagcatgaaaacattaacctttacagtgggatgaacacaaagtctagcacagagaggaactcaatgaatgtgtgttgaatggatcatacatggcatatactgaggggtgagctccaaagaacactggggaattcaggtgggaaaataaatcaacccacgttatgtggtatcgtgtaaacaaaataactgattgttctactacacatttttgctttaaaactgttgagattagagttcatataaatggagactaaaatctaaggaaatgatatcacaataggaaatcattttgttaccaaaataatgtataagcaacacatataaggaagagatacttcatgagatcatttctgtttcttttcacacgagtagtcaaaattatatttgaagtaataaaaccatcatgatatccgtggaagatagagttcccaataatattaaaacaacaatgtaacttttgtttctttgttgaggataagtgcattatgtattgttattaatatttaatttttaacaacaattttattaggtactggtgctacttcattttatagattaagggacagatgacagaaaaatgagaatttaacaagacttaattcataaggtcttaagaagttaaaaattattagaaatttgcctgctcaagaagaaataaagggaatctttccaaattttttccctaacccctcctccttttcccccttttaaaattcttgccttttctggatgccacttaaagagttccaaactaaaatgttcaaaaattgcctgagcattactttcactcttattatattaatataaaccttccacaagttgatttaaaggatatgcatttcaatcaaccataatttcttctcttgagttatttcattgtctttctgtcctaactcagctgggatgcaggcttacattgacattaaaaactgcccaaagaaaaccaggaatcttaagaaaataactcgtgagcagaggcggcacatgaagaggtgggaatacttcattgctgcagaggaagtcatttgggactatgcacctgtaataccagcgaatatggacaagtgagttgttggggttcataccactgggcaaaggttcaagacacattccatagggtcctagatgtttggggtgaaatgtaagttcacagctctcaaggggacacatgtattggtttctattcaagtctttttgtaaaaattaatcttgaattacccccaaatcaccaaagaaattcagcctaataataataaaaatgacaacagcagctaccttttgttgaatgtttgccattgccaagcactgtattgtccctttctgagagcttcgcttcaactctacaaactagatactgctcttatttctttttatagatgaggaaatgggtctgagagattaagagatttggaaattcaaatagctcttaaacccttgaaaagttactcaaattcactcataataacagaaatgcaaattaaacttcatgggaatactacttttatctatcacattcacaagtccagatgacatcatctgttgacaaggctgtgagaaaaaagaactatcatatattgttcgtggaagattaaattggtaaaaggattctgaagaataacttggcaatatgtatcaaaattctaaatgcatataccctttgactcagctatctcactctggaaatctaactatacagatacacttgttcacaggtgaaatgatgtatgtacaacatattcactgttgcaacgttagtagtagtaagactggaaacaacccaaaatgtccatcagtagaaaactagtttaataaattaggatacattcatacaatggaatactaagcatcaaaaaaagaggatgcaaacactctgtatgtactaatacaaaaagttctccaagatatgttattaaattaaaaagctgggatgtagtatagcgtgtatacatagctgccttttgttaaaggagtgaaagggataagaatatttatattttcttatttgtaagacataaaggtattctggaattacacgcatgaaattaatatatggctacctagaaaattcagggagggtagggaggtcattttgagagtcatcagagaaaagtgagagttttcactgtaataaaaattatgtgaatgtattttctattaaaaacaattaaactaggaaaaagaacaaaaaaaatttggccaagattatagaattgttgacagaactgagataggaatccaggagtgtttggcaacagtcagtgctttccactgggaaaaataaattcataaaatgatattccatcttaaaagattgctgggttaaatgatatttctgactttaggtcttggaggaactgccatactgtcttccacaatggctgaattaatttacattccaccaagagtgtataagtgttcctttctctccatgaccttgccagcatctcttctttcttgacttttcaatcatcgccattctgactggcatgagagggcatctcattgcgtttttctttctttttttgagacggagtctcgctctgtcgcccaggctggagtgcagtggcgcaatctctgctcactgcaagctccgcctcccaggctcacgccattctcctgcctcagcctcccgagtagctgagactacaggggcccgccaacacaaatacaaaatacaaaaaatataattttttgtatttttagtagagatggggtttcaccgtgttagccaggatggtctcgatctcctgacctcgtgatttgcccgcctcggcctcccaaagtgctgagagtacaggcgtgagccaccgcgcccggcctcattgtggttttgatttgcatttctctcatgaacactgatgttgagctttttaaaatgtgctttttggccgcatgtagttgcttttgcaaactaaggtaataaagagggcaggggaaaagtggttcatgtttctgctcccaaagtatttatcccagtagctacaaaagatgggtgaaggaggttgcttttcagtcagctcagagaattggctagatggtggaagagatagcccaatagcacagaactatgattaacaatgctagtaaatgtttcctggggttggaagttgcttttagggattaagaaatacctttaaaaccaaaaaggctatcatagaataagtgataggacagactttagaaaaattcctagtatcttttcagccagtataggccttttcccagagatatcaaatgtctgctgtagcaataagaatgacaggaagatctaagtagctgcttctaaccagttacctatgacttttatcagtgatgcaggagacaaatcagaagtttccagttttccaactagacagaaaacataaggactttgcaaactacactaagaaatttttagagaactagtatgttagctaatctaagagcagaatgtttaagcacaagggtttccccatcctaccgagatctctatttgagaaagtggtttaatttttttttacttcactttaagaaaatacaggtctcagcatttggataatttctcaaaccaaattggaaaacattataagaaagttatgtacacacagtacgaagatgagtccttcaccaaacatacagtgaatcccaatatgaaagaagatgggattttgggtcctattatcagagcccaggtcagagacacactcaaagtaagtaacacaaatacagaatcatgggagaaattacatagtaaaatattatggagtacctggttattttttaattttaaaagaaaaagatgctcatataattttaaattcaaatgcaacttttagtttttatttagtatttgtatttatttacagcttactcagtaatacaaaggatctgagacagtttctcaagttataaaggcataaaacaaggagtctatgtaattgggatagaatacggggacaaagaaaataaagccacagataagtagataccatgtgaccctgtaaggctgtcttcaaattttgtcctaagctttatggcagtcagtgtaaaaaaggaaatatgtcagggtgaagtttacatcatctacaaaaagaaagcaccatttatcctgatgttaagatctaagaggaacttctttaatgagttctacaaaagagagtgctgagtgatacagtagatggcatccttgataaaattcttataaccagcataatagattaaaagttgcataaaataatagattaaaagttgcattaaaatatttctcattatagctaagatataacagtaaacacaattgaatagaaacaatttttactcattttttaatgtagtctaggtatgcagctctctaatggttggactctgatgaaggtaaactccatgtatcaagagcacggagttttcctcagacaattctccttaaatgtcatgtcacttcaccaagatagataagaattggacagcagagaattaaaggttgcaatctttgacaaaatcctagagtgtagttaatctacagacaaaggatgatccaaaggctttgacaatcaaccaaatagaagataggattaaggttctcttttgcagattaaagagcctaactaggactcctgtgtgttttatgcacctgacaaggtctattctgttcatttaaaatagccaaaggacaaaagcagttttttttctccatgcctctttcccttcttccatttctgatcccttttatgtgctctcagcaagtgtagacataccttattaaaagttcaggatctggctatttgtctgtgcctctcaagcaagtagcttttcccccccaccaagggtcttactctgtcacccaggctggagtgcagtggtgtgatcatggctcactgcaacctccacttcctgggctcaggcgattctcgcacctcagcctctcaagtagctgggactacaggcacacgccccaacgcctggctaatttttgtatttttttgtagagatgaggtttcaccatgttgcccaggctggtcttgaactcctgagctcaagtgatccacctgcttcagcctcccaaagtgctggggttacaggtttgagccactgaacctagctgagaagatgacttcaaagacagtgtcctaaaaaatctaccgggcaggggaaggggatcatggtctagagatgagaagcagattcaaaatgagatgtggcccaagctgaaaagagaagggcaggggaaggaggacttgcttggagagagtgatactgtgaggaaaacgtcacttctcctaacctatcctctaaagtcagacttctctttccattttccaccttaatgtgtgagtgaaacactctctccaatgctcctgccaagtgatgaggggaggttactgctcagataaacagatctaattttcctactgtgtgtacacatgtatacacacacaccatccaaaaggtgaatatgcaaagctagtatcttatattatttgtcatgatcaaccttaaatcctagaataaatttgatttaactttgtagatcgtgttcaaaaatatggccagccgcccctatagcatttaccctcatggagtgaccttctcgccttatgaagatgaagtcaactcttctttcacctcaggtttgaatctttcacttctactgaatccaactagtaacttctgagaggctgccacatttttctgctattctccttgcccggtggtgtcactactgcagtcaggtagtatacatgtaggagtatcctaaaaatcacagccaaacccttctcacttcaggagttttgtctcttagtggtaacaaaatatggtgtcttttattagtgtcatagtggcctctagtggagcattatctaatggctacatgttatccaggttccaagtagaatatttaaagaattcaattgaacaatgagaacatttagacacaggatggggaacatcacacaccggggcctgtcggggggggggggtggggggcggggggagggatagcattaggagatatacctaatgttaatgacaagttaatgggtgcagcacaccaacatgacacatgtatacatatgtaacaaacctgcacgttgtgcacatgtaccctagaacttaaagtataatttaaaaaaaataaaaataaaagaattccttttgcaatattaattggttccagcgaaagcttatttatttatttattatcatgaaataactttgcaaatgaaaacaattttgaatatattttctttcaggcaggaacaacaccatgatcagagcagttcaaccaggggaaacctatacttataagtggaacatcttagagtttgatgaacccacagaaaatgatgcccagtgcttaacaagaccatactacagtgacgtggacatcatgagagacatcgcctctgggctaataggactacttctaatctgtaagagcagatccctggacaggcgaggaatacaggtattttgtccttgaagtaacctttcagaaattctgagaatttcttctggctagaacatgttaggtctcctggctaaataatggggcatttccttcaagagaacagtaattgtcaagtagtcctttttagcaccagtgtgataacatttattctttttttttttttgtcttgtctatttttatcagtaccatcactgccgaaggcaagtctagagtgtgataacatattttgtcttagtttcaaattccaggtctgttggtattggatgtgttgagcaagttgattagcctttcctaatttcttccttttatcaaatgggtaataaccctcctaaaaatgttacaggtctgtttgggggttcagtgagataccatctggtaaaagtataaagctctttaccagtctttgctatttttagagacctgcaatagggagacagaggagagattctctgaaagcaaccaaatttagagacatagttcctagtgaaattggacccagattatggcccatctctgttgagactaaagtatacagaagaatgtgaacaaagatactgaatttctgagtttgtcttcattgaagaattgtagtctcatattattaaactaaaattcccaattatgctaaactgtaaccaaagaggtcttatctcaaggcatacaaaataaacatatgcctagaaaaagcagaaatgaatttctggacatatggaagatcctgatttattgagctaggaaaggaaacaggtagtagaagcataaggcttttctattgcaaccttctctttcatcctttgcacttattcagagcatattcagtcaatcattcatgttgaaaggtgtgcaattacagagatagacagactttcagctgccatagcgaaatgagatttttcttttgggatttgttttttttttttttttcttttgagacagagtctcactctgtcacccaggctggagagcagtggcaccattttagatcactgcaacctctgcctcctgggttcaagtgattctcctgcctcagtctcttgagtagctgggattacaggcgcccgccaccacccccatgtaatttttgtattttttagtagagacagggtttcaccatgttggctaggctggtctcgaactcctgacctaaggtgttccacctgcctcagcctcccaaagtgctggtattacaggtgtgagccactgtgcccggctcttttgggatattttaatctctgaattttcttatctgttctgtttgcttttgcatattacctttagctctaacaagtgctgtgtacacaatggactctcataaatgcctgaattatatggcttcagtagttccaagaactatgtcactttggtttctgagaactcagtggtgtagataatttgctgcaatgttaatgactgaatacagcacttttttttcttttttttttactcttaagttcaggggtacttatgtgcaggatgtgcaggtttgttacataggtaaacatgtgtcatggaggtctgttgtacttactacttcatcacccaggtattaagcctagtatccattagttattttttctgatcctctccctctttccaccctccatcctctgataggccccagtatgtattgttcccttctatgtgtccatgtgttctcataatttagctttcacttgtaagtgaaaacatgcagtatgtggttttctgttcttgcgttaacttgcttagaataatggcctccagctccatccatgtccctgcaaaggacataatcttgttctttttgatggtcacatagtattctatggtgtatatgtaccatattttcttcatccagtctgtcattgatgggcatttgggttgatttcatgtctttgctattgtgaagagtgcgaaaatgaacatacgcatgcatgtgtctttataacagaatgatttatattcctttgggtacataccaagtaatggaattgctgggttcaaaggtatttctgactttaggtctttgaggactcaccatggtatcttccacaatggttgaactaatttacactcccaccaagagtgtataagtgttcctttttctccacaaccttgccaacatctgttagtttttgactttttaataatagccattcttattggtgcgagatggtatctcattgtggttttgatttgcatttctctaatgatcagtgatgttgagcgtttttttcatatgctctttggccacatgtgtgtcttcttttgaaaagtgtctgttcctgtccttggcctactttttaatggggctgtttgtttttttcttgtaaatttaagttccttataaatgctccatattagacctttgccagatgcatagtttgcaaaaattttctcccattctgaatgttgtctgtttactctcttgatagtttcttttgctgtgcaggagctctttatttcaattaaatcccatttgacaatttttgcttttgttgctattgcttttggcatgttcgtcatgaaagctttgcccatccctatgtcccaaataatattgcctaggttgtcttccagggtttttgtagtttggggttttacgtttaagtgtgttgttgttgttttttgtttgtttgtttctgttatttttgagatggagtctcgttctgttgcccaggctggagtgcagtggtacgatctcagctcactgcaacctctgcctcccatgttcaggtgattctcctgcctcggcccctcggcctcccgagtagctgggattacaggcataagccacgatgcctggctaattttcttttcttttcttttcttttctttttttttttttttttagtagagacgggttttgccatgttgaccagactggtcttcaactcctgacctcaggtgatccacccgccttggcctcccaaagtgctggtattacaggcgtgagccaccgcgccaggcctacatttaagtctttaatccatcttgagttaatttttgtatatgatgtaagaaaggggtccagtttcaattttctgcctacggctagccagttttcccagaaccatttatggaatagagaatcctttccctattgcttgcttttgtcacagatcagatagttgtaggtgcgcagccttatttctgagttctctattctgttccattggtctatgcgtctgttcttgtaccagtactatactgttttgtcctccagagggcagcagacatcgaacagcaggctgtgtttgctgtgtttgatgagaacaaaagctggtaccttgaggacaacatcaacaagttttgtgaaaatcctgatgaggtgaaacgtgatgaccccaagttttatgaatcaaacatcatgagcagtaagtcagagtactatttttgttcatcagtttttcattcctgtggttgaaatatgactgtgcctagagtcagagacatggattaaaatctactcgctaaggggcacctccaatcctcacttccagtccaaagacttggtgatgaaatccgtgggtgacatcatagcaacatttttaagcaagaggtcaaaggctcacatccttagaaatgcgtttgatcttctattccaagcgtgtgtgtgtgtgtgtgtgtgtgtgtgtacacagacatactctgcgtggtgaggaaaagggtgagagagtaggactaatggaaggtgttatagtccatgtcaatagtatcctagactgagttcagggtgaatatatggctaggacagaaagaaggcaagtaatccaaagatggattgacacatcaaagtagagcaaaatgagtatagggacccaagagtcttggaaaggcatgcatgaagacatttcaagtgatcagtaagattttcagaacaaaaggaattccctgaatgagggttccggcatttgctgcagttctaaagttcagtggccaaaagcactgccatggcagtctgagagaaatgtcactgagccagctggaagcaaacttctccacaacagccagggtccccctactgatcctcagagtctagagtcatggtaatcaccttctctagtaggtaatcacacatgtgaggatgatttctgcatgttctgttcatatagcttcagatgactgacagctagggattatcagagctgacaggtgccaggtcaaataattcaaacagaaaattactctcagctttctttgcataacttccttttggcagtgaatctatcatagttctagaccagtgctgtccaatagaaactacgtatgagctacatgcgtaatttaaaattttctgatagcaacattaaaaagtaaagagaaataggtgacattaattttagtaatatgttttacttaactcagtatatcctgaatattatcatttcaacatgtaaccaatataaaaattaatgagacttactttattactaagtctttgaaattcaatgtatattttatactcacagcatatctcagtccagtctacccatatttcaagtgctcgataaccacttgtagccagtggctaccatattgaacaatgcagttatagaccatttagaaaaacatctagaatgaggtataaactaataatacatcatgtaaattattaaagtcacttaagtgatttaagtaggtatttaaatatttgttaatgccagtcattatactggtactaaggctaagagtggtaatcgaggtagacatgagccctgcccttgtagaaatcatacctttggttttttactatgcttagtacataagtaaataaaaatattgcctacagcagtgtcccttttaacaataatgaaatgtatgaactggatactcaaatggaaactgtgaatactatgtagattataagacagcaataaaaactataaaatatgctaaatgggctttatttttagggacattacttcttacccaatgactaatatatcaaaaagatgaatttcttatattatgcttttcctccaagtggaattattagaatatctttaaaggcagagaatggagcacaaaatatttactatacatttgatgaatgactaaatcaatgtaaatggaaggctttatctttttcctgagatttctcctttggctaatttaggagaataatctctcatttgaaaattctgagtttgatcttctagtcacatgttagactagataaagcttatcttggataatcactgctttgacacaaccaaattaacatggagacatttatcttaggtataattagacacatgcccttttgttggcatagacttggaattttaacagattttacactttcagctatcaatggctatgtgcctgagagcataactactcttggattctgctttgatgacactgtccagtggcacttctgtagtgtggggacccagaatgaaattttgaccatccacttcactgggcactcattcatctatggaaagaggcatgaggacaccttgaccctcttccccatgcgtggagaatctgtgacggtcacaatggataatgttggtgagtaagagtctggacactcacagaggaagcttgctttgaatttctggtctataaaggtctgctgcaactctccaggctaccagtgctcctctatgtatctccctgaccccctgcaggcttttctttcaatgtttctcatgatttctctttgagaaattaatgacttaaatggatccagttctttagtgtgggttatatttttccttctctgggcaaagtaggaagtaaaaatatacaacagcagaaaaataaggcataactctgaggaagaagcataaatattttggccacaaaagagcatttcttttatcaaaatgccctattcggttttttgcaacagtcatcttcaatcatcaggtacagtgccttaaaggctgcttcagcaacagctttggagtttgtcagactggaatgcaagtcctgatctgccaatcgattgctgtgtaaccttacacaagttacttggccacactgagccacaagtcatttatctggaaaacagtgtaatcacatctcacagagttactttgaccattaaaatagtaatatgcgccaagtgcctagcactcagtagacaccaacaatggtaactattggagactcaccaagaaatctttgatgttccagcaatgcatgccatttcagagattcaaaattgtcctcgtgaattattacttagaaacatctaaatgtctcttatttgtggggatagagctcatcaccatccctttaattctaagacaagatgtgctgttaggatatttatgatattaaaagtccattttattcttgattcatccctttcttaatatattttaaaatagtgagcaactatctgtgctgaaagaccttttttcccctctaatctccactaagcaacacttttgttttttattctgttaagcgagatgaacgcactggtcatgtgcttagagtcacagcaatgtcaaattgctttagaaaaacaaaagtttactaaatatttcattctcatttttctctccttgtgttattttgacccagtaatcaataggtcacagacaagcagtggtccacagcccatacttgaatattcctgacgaaagtttattagaaattacctgccacaatggattattgtgttttcatgtcttttcccagacttccagatctctcttctgtctgtctctcttctgtaggaacttggatgttaacttccatgaattctagtccaagaagcaaaaagctgaggctgaaattcagggatgttaaatgtatcccagatgatgatgaagactcatatgagatttttgaacctccagaatctacagtcatggctacacggaaaatgcatgatcgtttagaacctgaagatgaagagagtgatgctgactatgattaccagaacagactggctgcagcattaggaatcaggtcattccgaaactcatcattgaatcaggaagaagaagagttcaatcttactgccctagctctggagaatggcactgaattcgtttcttcaaacacagatataattgttggttcaaattattcttccccaagtaatattagtaagttcactgtcaataaccttgcagaacctcagaaagccccttctcaccaacaagccaccacagctggttccccactgagacacctcattggcaagaactcagttctcaattcttccacagcagagcattccagcccatattctgaagaccctatagaggatcctctacagccagatgtcacagggatacgtctactttcacttggtgctggagaattcaaaagtcaagaacatgctaagcataagggacccaaggtagaaagagatcaagcagcaaagcacaggttctcctggatgaaattactagcacataaagttgggagacacctaagccaagacactggttctccttccggaatgaggccctgggaggaccttcctagccaagacactggttctccttccagaatgaggccctggaaggaccctcctagtgatctgttactcttaaaacaaagtaactcatctaagattttggttgggagatggcatttggcttctgagaaaggtagctatgaaataatccaagatactgatgaagacacagctgttaacaattggctgatcagcccccagaatgcctcacgtgcttggggagaaagcacccctcttgccaacaagcctggaaagcagagtggccacccaaagtttcctagagttagacataaatctctacaagtaagacaggatggaggaaagagtagactgaagaaaagccagtttctcattaagacacgaaaaaagaaaaaagagaagcacacacaccatgctcctttatctccgaggacctttcaccctctaagaagtgaagcctacaacacattttcagaaagaagacttaagcattcgttggtgcttcataaatccaatgaaacatctcttcccacagacctcaatcagacattgccctctatggattttggctggatagcctcacttcctgaccataatcagaattcctcaaatgacactggtcaggcaagctgtcctccaggtctttatcagacagtgcccccagaggaacactatcaaacattccccattcaagaccctgatcaaatgcactctacttcagaccccagtcacagatcctcttctccagagctcagtgaaatgcttgagtatgaccgaagtcacaagtccttccccacagatataagtcaaatgtccccttcctcagaacatgaagtctggcagacagtcatctctccagacctcagccaggtgaccctctctccagaactcagccagacaaacctctctccagacctcagccacacgactctctctccagaactcattcagagaaacctttccccagccctcggtcagatgcccatttctccagacctcagccatacaaccctttctccagacctcagccatacaaccctttctttagacctcagccagacaaacctctctccagaactcagtcagacaaacctttctccagccctcggtcagatgcccctttctccagacctcagccatacaaccctttctctagacttcagccagacaaacctctctccagaactcagccatatgactctctctccagaactcagtcagacaaacctttccccagccctcggtcagatgcccatttctccagacctcagccatacaaccctttctctagacttcagccagacaaacctctctccagaactcagtcaaacaaacctttccccagccctcggtcagatgcccctttctccagaccccagccatacaaccctttctctagacctcagccagacaaacctctctccagaactcagtcagacaaacctttccccagacctcagtgagatgcccctctttgcagatctcagtcaaattccccttaccccagacctcgaccagatgacactttctccagaccttggtgagacagatctttccccaaactttggtcagatgtccctttccccagacctcagccaggtgactctctctccagacatcagtgacaccacccttctcccggatctcagccagatatcacctcctccagaccttgatcagatattctacccttctgaatctagtcagtcattgcttcttcaagaatttaatgagtcttttccttatccagaccttggtcagatgccatctccttcatctcctactctcaatgatacttttctatcaaaggaatttaatccactggttatagtgggcctcagtaaagatggtacagattacattgagatcattccaaaggaagaggtccagagcagtgaagatgactatgctgaaattgattatgtgccctatgatgacccctacaaaactgatgttaggacaaacatcaactcctccagagatcctgacaacattgcagcatggtacctccgcagcaacaatggaaacagaagaaattattacattgctgctgaagaaatatcctgggattattcagaatttgtacaaaggtttggccagttttctccttttttattctcatttttccattactgctgaaaaaagtagctactacaattcagggggataattgtgggcaaattatactaagaacagtgtggttcccctattgcaagttggcctgttctttttcctttgtcaattccaagattgcttctttaccttagatgacccctggacaatataagaacaatcactgtgagaactctataatattctgtaattaagcatttttctgtgtcctctcctcttactacccatgtttctactgactcttattgctccaggcagagcccaacctatccatagctatatgctaatcaatatgatttaattgaagttagcctcaaatccaaactcaaatatgatgtagaaatctcctttttgcatttacttgtttagatcagaatttctaagagatccaaatcccttttttaaaagaatatttacaattcagttttgcttaggggtagaaagccatgttgaactgggctctttgttctgggatgaagatacagaaagagaagagagaggaggaaaggagcaaggcttagtcaactacaaattctcagggatatagcatgatgactgtgcatcagctgtctagatatgcccacagcttttactaaagctgttacactaatcacttaaaaaaccaaagtgtaattacagtaggcaaacacaatgtatggtgtgacttatgcatatgagttcattaatctgatgcctgacatctccacattagaactctgtttaaaacaccttttcctatgacttcctatttaaatgttgcactcaataccacatgagaacaactagctacctgagtatttctaagcaaggccccgagggagtgagatgcagggcctgtccagagtgaatagggatggaaccaccttcaaaatcttgtattccattcaaggctcacaacccacttttatggcattcggagttgctttacccactcccttgtgttctgtgagtttgcatgttatgctcagagtctggaaagatgggattagtaggggaggtagaccagaagaaaggcagaaggagattctctgttgatgactcacagtatatagcaaatattatgggtttgatgggtgagtgtttggcttgtttccacaggcttgggaaatgtgagagtcagtgggagaattcgacatgcttcagtcctagactgagccaatgaactagatggaaataatgtgctttatttatttatttataatttgtaattaaactttttattttggaacaaaaataaaatagattcacatacagtcaagagaaataatacggagagatcctttgggtatcctgagtattctttacccagtttctcccaggggtaacattttgcaaatctataatactatatcacaaccagcacactgatgttgatactgtcaagacacagaatgttcaccatcaccataaaaatccctctcattacccctttatagtcacatctgccttcctcccaccatagcccttccttattccctggcaaccagtagtctgatctccatttctataattttgtcatttcaagaatattacataaatggaatcaggcaacatgtaacctttggggactggtattttttcactcagtataattctctggagattcatctggttattgcatgtattccattatatgggtgtaccccagtttttttgttgttgttgttttatacacatttatggtgtaaacatgatgttttaatatatttataaattgtgaattggctaaatcaagctaattaacctatgcattacctcacatacttttttgtggttagaacacttaaaatgtactcagcaatgttaaaaattcagtgtgttgttattaactacagtcaccatcttatacaacagatcttctaaatttatttcttctaactgaattttatcttttgaccattttctcaatgctccacctctgtatccctttgttaaccactgttctaccttctgcttctatgagctcaatgtttttagtttccacattataagtgagatcctgcagtacttgtctttctgtgcctggcttattttatgtaacataacgacctcctggttcagtcatgttgtcacaaatggcatttcttcgttttcttttttttaaatgctaaatagtatttcattgtttatgtagatcacatttaagaaatccattcatttgtttatagacatttgggttgcttccctatcttggctaatgtggctaatgctgcagtgaacgtgggacagcagatatctcttcaacatactgatttcattttctttgggtatatacccaaaagtgggattgatggatcatgtggtaattctatttttaatttttaaaggaacctcccatactgttttccataatggctgtactaatttacactctcaccaagagtatacaagagttcccttttcttcacatccatgccaacatttatctcttgtcatttttataatagccatcctaacggtgtgaggtgagccctcattgtgattttaaattgcatttctctgattattagtaatgttgagcatcttttcatatatttgttggtcatttgtatgtcttcttttacgaaatgtctattcaagtcttttgctcattttttaatcaggctatttgggttttttgctgaattgagttccttatatttttaatattaatattcttatcagatatctggttttcaagaatattctcccattccaaaggttgtctcttcactctgttatttcctttgctgtgcataaacttttgagtttgatggcaatcccatttgtctatttctgcttttgttgcctgtactttcgaggtcaaatccaaaaaatctttgtccacaccaatgtcaagaagcttaagaataatggacattagcaaaaaacaaatgtgagaagagtggctacttttagggtacaaaacattcacccatccagtgactttcataagtgtgaccttctaattaatctgaccattgtcacctgatagccccaagctctggcactgtcccattacatggctttgtctgcctttgatcttaaaatttggtgtgttaacatacgattatatttatacattcatttatatgtttgacaaaaatttattaagttcctgctgtgtgtcagataatgtgcttaccactggagagagtactatgagcaaactaggcacaatggctgacctcatggcacttatacccagtgagagacagatattaatagataatctcacaaataaattatatataatctacaatatatattctagagatattataagaatactacaggaatttactatatatactataataatactatagaaatatgagaaattgatatagagacttgacctagtctaaaaggtcataggaagacttacctataaaataatatttgagttaggaattgaaagatatttactggcttttgtttttatccacttatatatttactcatttatccaccaagtatttattaaagaccttctctatgctagatgctatatttagaaagagacaatttcctaaattctgggaacagtctttaatttcttcttttacacaaatagtattattatttcagggaaacagatattgaagactctgatgatattccagaagataccacatataagaaagtagtttttcgaaagtacctcgacagcacttttaccaaacgtgatcctcgaggggagtatgaagagcatctcggaattcttggtcctattatcagagctgaagtggatgatgttatccaagtaagtcttttgagcactgctaagatcttcggaggaatttccacaagcaccagagggttgtaaaggtgcaggtggcaagagagctataggtgatttgtttgttttccaggattaatgaataattacatttcttttcaaagactccttgccaagcaatttggcaatcttcgaactaaaaaaaaaaaagatctcattttttaaatgctgaaaactatataatctgtggaaaatctttctgtaatttctatctaaagctaacctatctaaagttaacacagaaaattaatatattcaagagcaattgaattgggtttcatagcagtggtggtggtggtggcagtagcagtgctagtagtaatagtaatttagaaatatcttcaggtgttttcctaaaaattaaataaaatgaagttaaataaaatgagtaaggaaagtaaagatgtctccatgccctccaaaagtgagcaagtttcttcagtgtcttcctagttctggtaatttctttcaaaatcttgtgtccagacccacgattataacttgcttttataacaaagtttacttccgccatttttgctaaccgctcacattcaaaaacccagaaagaaccctgattctaaagtaagctattctagattttaaaatataatctactatacctgtgtaagcattcactacattttcagtgaccatttgctctttttaaaaacgtaaacaagtacatagggatataagaatcttaattattctaaattttccatgaagctatgggaggcaatattctcttttatgattaggggatcctttttcaagatgaacgataatttaacacaatatttaaaaaacttattctaagtaactcaggaatcaaaaaccagacactgtatgttctcacttacaaatgggagataaactgcgggtatgcgaaggcagacagattggtataatggacattggagactcaaaagggaacgggggatggatgaaaagctacctattgggtacagggtacactactcaggtgacaggtacactaaaatcctagacttcaccactatacaattcatccatgtaaccaaaaaccacttgcattcctaaagcaactgaagttttttaaaaaatttaaaaatcaaaattaatgcacgaaagccacaataaacaaaacctcacaattgtgaataaagacaggataagtaacaatgttgcattgagacatactggagccttaggcaaaaggaaaaaaatcaaatactgaatctttgttttagccctggatttcactagataaaaatgacttcatttgtgtatttttaaaataattttaacttttattttagattcagggggcatatgtgcagttttgttatctgggtatattatgtgatgctgttgtttagggtatgattgatcccatcatccaagtagcgtgcatagtacccaatagtttttcatcccttgctcatctccttccttcccccttctagaagtccccagtgtttattgccatctttatgttcatgagtacccaatgtttagctcccacttataagtgagaacatgtggtatttggctttctgtttctgcattaattcacttagcataatagcctccagctggcatccatgttgttgcaaaggacgtgatttcagtctttgttatggctgcgtagtattccatggtgcatatgtaccatattttctttatgtagtccaccactgatgggcacctagattgattccatgtctttgctactgtgaataatgctgtgatgaacatcctagtacatgtgtcttttcagtagaacaatgtattttctgtctttctttcttttttttttttttgagatggagtctcactctgtcgcccaggctggagtacagaggtatgatctcaactcactgcaacctctgcctcccaggttcaagcaattctcctgcctcagcctcccgagtagctgggattacaggcacccaccaccatgcccagctaatttttgtatttttagtagagacagggttttaccatgttggccaggctggtctcaaactcctgacctcgggcaatctgcctgcctcagcttcccaaagtgctgggattacaggcatgagccattgcgcccggctgaacaatttattttcttttttggctatatacccagtaatagaattgctaggtcaaattgtagcaggacaagccacagacaaaaacccctcagacaccaagttaaagaaggaagggctttattcagccgggagctttggcaagactcatgtctccaacaaccgagctccccgagtgagcaattcctgtcccttttaagggctcacaactctaagagggtccacgtgagtgggtcgtgattgattgagcaaggagggggtacgtgactgggggctgcatgcaccagtaattagaacagaacagaacaggacagggattttcacagtgcttttctatacaatgtctgtaatctatagataacataaccgattaggtcacgggtcgatctttaactaccaggtccagggtgtggcgccgggctgtctgcttgtggatttcatttctgccttttagtttttacttcttctttctttggaggcagaaattgggcataagacaatatgaggggtggtctcctcccttaaaatagtagttctgtttcaaattctttgagaaacccccaaacttctttccacagtggctaatttacattctaagcagcagtgtataagcattcccttttcttcacagcctcaccagcatctattttttgactttgtactaatagccattctgactggtgtgagatggtatttcactgtggtattgatttgcatttctctgatgattagtgatgttgagcatttttttcacatttgttggctatttgtatgtcttcttttgataagtatctgttcatgtcttttgcccactttttaatggggttatttgtatttcgcttgttcaattgtttaactatcttatagtttctggatattagacctttgtcagatacatactttgtgaatattttttctattctgtgtctgttcactctgtagatagcttcttttgctgagcagaagctctttagtttaatttgtcaatttttgcttttgttgaaatgcttttgaggaattagtcataaattctttcccaaggctgatatccagaatggtgtttcctaggtttttcttctaggattcttatagtttgaggtctgacatttaaatctttaatccattttgagttaatttttgtatatgatgaatccagtttcattggattcattggggttcagtttcattcttccacatatgggtagccggctattccagcaccatttattaaatatgagtccttttccccttgttttttgttgttgttgttgctgttgttgttgactttgtcaaagttcaggtggttgtaagtgtgtggctttatttctgggttctttattctgtttcattggcctatgtgtctgtttttgtatcagtaccatgctattttggttattgtaactttatagtatagtttcaagtcaggtactgtgatacctccagatttgttctttttgcttaggattgctttggctattcaggctcttttttgattccatatgaattttagaatagctttgtctaatcctgaggaaaatgattccagtagttgttaaaaaatagtgttgaatctgtagattgctttgggcacaatggctattttaacaatactgattcttccaatacataagcatagaatgtttttccatttgtttgtgtcatctatgatttctttcatcagtgttttgtaattcttcttatagagatctttcacctctttggttagatgttttcctaggtattttgtatgtgtgtgtggctatgtttaatgggatttcgttcttgatttcgctctcagtttgaacattactgatgtatagaaatgctattttgtacatttgtacattttattttgtataattgattttgtacattaatcttgcatcctgaaactttactgaagtcatttatcagttcctggagccttttcatggagtctttagggttttctaggtacagaatcatattgccaatgaagagagatactttaacttcttttcttctttggttgccttttatttctttctcttgcttgattgctgtgactagaatttccagtactatgttgaataagagtgatgagattgggcatccatgtcttgttccagttctcacggggaaggctttcagcttttgctcattcagtatgatgttggctgtaggtttgtcatagatggctcctattagtttgaagtatgttccttcaatgcctagtttgttgagggtttttatcatgaagggatgttaggttttatcaaaagctttttccacatttattgagatgatgatactgtttttgtttttaatgcggtttatgtggtgaatcacatttattgatttgcatatgtggagccactttgcatcctaggaatgaagcctatgtgattgtgatgaattaatttttaatttgctgctggatttggtttgccaatattttgttgaagatttttgtgtctatgtacatcagagatattggccggtagttttcattattcattgtgtctttgccaggttttgttattagggtgatgctggctttgtagaataaaataaggaacagacaattagggagtctttaatcactagaagttatagaagggctgggaggagcttcatgggtctgactgctggggtgtgaagacttctcatatggcatttaagtcctttaccatctggccccaacctgctccttttctagcctcatttctcaccaggttccacctgtccctgtgcatttcacagcccagttccaccgagatccttgctattccccaaactcttcctttactcccctgctcacaggcatccttctgcccttctgagagtctgaaatgtctttctagctcctgttcattctatgatggccaattccatttcctctaagaaacttaccttaattcttccaaccactcctaaatattcaaccaaattgttcctccagggcattgtcatctgaacccacttagactttgtatatagcacctgttgtctccagatttgtagtgtggatgcccatgtgcatgtctgtttcagcaggagcttaaaagcttcttatgaacaagaatcaagcttctttcatcttcacatctccactacctatcactctcatttcattagtagataatgtcagtactttagccttgagcctaagaacaaatatcttttggtatttctggagaaaactacttgggccatatctcacaggatggttatgaaaattaaatgaaataatatacataagttattttgtaccttatatcttagctccgattttataaccagccattttgacttataatgctgacatttttgtggtttagatttttgttaagcttaagtacatttgtggatcattccttttcctaggttcgttttaaaaatttagcatccagaccgtattctctacatgcccatggactttcctatgaaaaatcatcagagggaaagacttatgaagatgactctcctgaatggtttaaggaagataatgctgttcagccaaatagcagttatacctacgtatggcatgccactgagcgatcagggccagaaagtcctggctctgcctgtcgggcttgggcctactactcagctgtgaacccagtaggtactttcattgaaagtttttctcattcccctaacctcgtaatctgaagtccaccaaatggaagagtcggggttatttcttgtcaaatgtctgtcttgcttttcatgaggaatgcataagggtgtggttaacagtctgcatttatcataaccagggactctccatgcagctcttcagatgacagagagagaaacatttattcagtggagaggaggaaagattacttgaatgattggccatgaattagaatgcctacatttacagaagatggcatttatttgaaattttcttgaacaagtattagctatgttctgctctttctttatgaaaagaactgcaaagtcaagactcctttatctgacattctgcaatgtatatatacttcaaaacaatatgtcatacacagtatatgcatacaattttatctgtcaattaaaaagagaaacaactcctccatttcaggcatagtggaaagagcacagactcagatttaaatttttaccctgtcaatgcataatcctaggaaattccttgacctctcttagcctggtatcagaagttaaaaatgagataacagtacatagtgcatggtaagcacttggtaaatatttgttcaatgaatgaatttatatttaccatataagatagttgtcaggattaaatgggagattgcaggcaaatcatttaatatagtaatagattctcaataaatagtatcccttatattatcaatttattattatcatcattgttactgggataaagatcaatcagaggaaggaggattatgaatacaacagaattaggtgataaatatccaggcttattatgccattcatttataatcttcatcttcaaattcagagcctatcagaaagtttccttttctatatgatgagtgattatcagaagagcaaggaaattcctgagaaagaggcaatacaatttactctgtttttccaggaaaaagatattcactcaggcttgataggtcccctcctaatctgccaaaaaggaatactacataaggacagcaacatgcctatggacatgagagaatttgtcttactatttatgacctttgatgaaaagaagagctggtactatgaaaagaagtcccgaagttcttggagactcacatcctcagaaatgaaaaaatcccatgagtttcacggtattttcctcagactttgatctaatctcctaattaaatcacactgggtcacagtgatttctgcccttagatattcacaagattagacatgagatgcttctgagacacccagagctacaactaaaaccggttccttaacattccagagggctgatgtaatctggcaggtgacactgtgggtgaggcaaaaagagaaagtctgaaagatagcacagagaagctgctgcaaaacaaaccaacagaaaaccacaacaacaaaaagccagtgtgcttcagctggtaacatacattgaaaaggaattaacattgttctgcaatttaaagttaataagcttgtttctggatctctaaaggcacaagtgtttatataaaagaaatgatcacctgtgtgtcttttctaaaataagaatgacgctaacagttttagctctcagcagctaccaggtggcacccaaagcatatgagaacaaaatgagataagaaactaggtacccaggtaataggagaatagtggcaagagagcatttgggtggtcacactgggaaaagtgtgcctatttggaaattcacaaggaaaatttgccctgtaagctagtaactgaaacagaaactgagaagagaaaggtacgagcttgtgttatgaatatgtagataggtgttctcacgcctgatataatttgaaggatgcccaaatgatctcaacccgtccctctccaaaaattcacctgcctggtttctgaaatttcacagcagttcctctaacttaagaaggaggaaacaaagcacttccttcactttggtttcagttaaacgtttggtaacactaaactttatctttacagttttgtgttacatttttaaggtgatcaagtttctcaggaactttttaaaaaatccgcgtattttactgtggggagagtagataaagcctgagaaccctagttatctaatctgagaagtgggcagaggagttgtcataccaataagagaataaacatgacttgctatggttgctggatacaccaacgataaactcctaattttataaactcctagacttcctaatttgcctgaaactttctctgaatttagaaggccttaaggtgacatgctgcatatctccttgctgactctaatccctggagtttactttgtctgcccatatttgtatttatcttttgtagttaaggaaaattaagactgttaatggaaagtatacacgggtaaagcacggaactgtaaaagctgaggaaaagagtgataaactgcttggaaagggagttccccctgccttctgctgtaggctggtgtgaatgatatgagaaggactagtggttctgctttagcctctcactaatgtgacatacaagagggccctttccatggctaggtaggcctgggaatgcagaatcatgaggaacatgggtgttgagtgggttgccccatatttccttaccactcgccctctctgtgtcaacagatttttaattgatttcaactctttgtcctttcagccattaatgggatgatctacagcttgcctggcctgaaaatgtatgagcaagagtgggtgaggttacacctgctgaacataggcggctcccaagacattcacgtggttcactttcacggccagaccttgctggaaaatggcaataaacagcaccagttaggggtctggccccttctgcctggtaaagattgggtaatgggaagaggtccctgctaagaaatacagggaaaaggcaatctgtaactccttctcatttcttccttgtgcatatacttcctaaggggtcagaacacagggttctggcatagagcctaggcaaacccatagacccaaagtatatacggagtacaaaaatgtcacctaatttatgaactatttgcagcaccacacaggctaaatgtgtgacccaactcagttgcaacataacatgcagtttctcccaagccactgtgtgtcatacagatgaggtcttaagcagatgaaaaaatgaatcccacagggctcaggcagctacagctatctctgctgggagggtttccagattcttcagttctgctcctcttctaggccctatcaccctaatatctttgggcaagtgactccaggaatcacattcttaaactgacttatagactgtttgaagaggaaaacatttttaaaaaataataataaaagttaaagaataacaaaggtatttagaacttttcatgtgcaaaataaagataaatgtagatttaaacagtctacaattatacagaagggatgtttctgtgccaatgagttgtttgtaagtgtatctacttgtgcagcagtataaaaacctaggaagtcagttaaaatgcagatgtgaaggcagagggattttgttctcagagactttaaagtagattttgggcagaattccaaggagtctgtatttttaacaagcagccttccttctattttgccttctattaaaagtaatggcaaaaaccgcaattatagtttgcaccaacctaacacatgctgcctgaggagttagtgaaggcagcccctcgacagcactttgggtgacgttgtgtgaatctgcctcagatgcaggcacagaagtccaaatggactggtttgattaagagcagggaaaaaaagagggttcttattggtttttcacatgccagtaactcactaatacatctagagagtattaattgtattatattaatatcatattaattaattaatataataattaatagataatttattgtattaaaatcagagacagaagagattcagtcaaatttactcatcttttcatcaagtattagaagatcagtcatccttcctatcagcctgcagacagactgagaagctaggattggctggtgtctctaaatctgcaaacctaaatacctgcattggagagaggaaaactggagacatttttcagtgtgtttgaggaagataatcatatctattcattttcacccacaatctgggaaacagtcataaattatagtcaacagaatttaaatattaactgccagggggtaatgttaaataccagaatggatagccagaggttttagaaatctcattctttcagtgttttttctgagcaatttatgtaaatctctattcaaatatgtaagctttatggaaaacttgaaaacatggaggaagaaggttttatttttattttcttatataaaaaagagaaaaaagcaaaaatgaaaagagggaaaggaaacatgtatgatatttttgaagcccaatgatgtcattcgaggtcactttgataattaggactgtgaagctgtattgtatgtgagttaatttgtaacattatatttagataagtgaaagtttcttctagtgaggtgtggtggtgatttaaaattttttttagttatctctgtgtatgtgttgttattgttttgtttttatctgttatactttcagtcctacctaaagaaaaatggttaaattctatttgaaagcctcttgtgaagcaggaattttaggattcttagagaactatcaaccacaatatttacttgttaatttttgcaaatgtaatgttgttctttttattttaggttcatttaaaactcttgaaatgaaggcatcaaaacctggctggtggctcctaaacacagaggttggagaaaaccagagagcagggatgcaaacgccatttcttatcatggacagaggtatcacaagagccatgtgatatttggtttggcaggagagtgcctattactagaatattaccaacttttagattggaaatattcaactctaagaactctgatgtgacaaaggcataatttgtagccataattgcttttattccggcccatggtctgattgcattgaaaacacatcagtcagatcaaaagcattcctgtcaattgggaaacctgtgtaaagcatccttcttcatgacttgtgatccatggacaagtgcatataagaaattttccagcttccaagagttgaggagggaaaaggtcacaggaatttaacaatgactgagtcactaaacttgacatttcagcatttaggaaacacagttttcatctgtccatctgttcatccattctttaagccattactaagcactgttgagtatgaagcactgtgccaacatccaggtagcacagtggctggtatcccttccttgatcaagatataaataaccttgtaactttgaggtcaacttttgagaacatagtctcatcaggactagaactttttttcatatttttatattttgtatttttattttttttgtagagaagaggttgcccaagatcaaactcctggcctcaagtaatcctcccccctcggcctcccagagtgctaggattacaggcatgagccactgcacctggccatggatggtacctaatgttgtaaaatagcataatttaagataaaagcagaagaaaatcagtttaaaaaatgattacatttcaggatttcagttgctttcttctaggatgccactatatctattaaagcaccagtcttgttagtgcatttaccattttataatcagatatatttaagtcagggccacacaaggtaggtaaaaatatctaattattgagtcagaaacataatccctaaccatggagttttactttattgtatatattttctaagcaaaaattattcattttttttctgtttttcatagactgtaggatgccaatgggactaagcactggtatcatatctgattcacagatcaaggcttcagagtttctgggtaagttgtagcaccatggtctgtgaatggtaccccctacagttgtgcagcatgcagcctatgaaaccatacatgacaatcctatctatgaatcagtttttctctttatgcttttctctactacaatgtagtgaagcagctccatttggggtacatatatggtaaaggaaggaacactatggtaggagctaaaggcctgttagtgtgctcttaacactgccacctcttctggtgtataatgatcccaaagagtcttttccaggaaaaaccgatagctgggggtcattgatttctctacataaaaagcccagcctctctgcagggatttggcaaggatcagataccttactcttatgaccacgcgcccatttccaaaactctcctcagtcatcttttctgggtttgaccacacatgtagtatttcagccagattcacagggtcttatcagccaggcattatagtccccattaatatggccctttgcctgtggcaaccattcatctattcagaaaactttgttgaacctccactatatgtgaggaactcctccaaagttttcccacactgcctcaaagcccttcccaagatcaagaggtcatgatcaagaggatgatgaggctcccatatacccttccatgtcttcctgttaggcaggcacattcagcattaggaatataaacacaacagaaaaaatcaaacatgacctgtgtgcaagaaaggggataggaggtggttggcagttgaccaaacacagacctgaagcccagatttcatcatcaaggactggcctagtagctgaggcccatgcctagactcctgactacaacacaggtcctccaaggatctggttttccactggattaaactcacttgagaaattgctgggtttttaaaaaattcagaataaatctttttcttcccttgagtttaggttactgggagcccagattagcaagattaaacaatggtggatcttataatgcttggagtgtagaaaaacttgcagcagaatttgcctctaaaccttggatccaggtttgtcttaatagactgataatatttactgctatcgtaataataaaaatgaaagtgatttagtaattccttgttattgttcttgcaatgttgttaggggaaatagcaagtactaagtgtgaggcactgttctaagtactttatatccttaaaatcaaccctctgaggttggttctaataatatcttgttttatagattaaaaaacaaaaggcacagagatactacctaccttcccaaagtaacacacagctaattagtcattgagttgggattcaaatttaggtactctgtgcccaaatatgaattgcatgtagtcattgtatcagtttgctaagatcttatgtgctagctctttagttctgaagaaagctgattgtataatgaatttaggcagtgtgtgacttgttgacaaggacagttctgtttactggctttcctatattgcaggtggacatgcaaaaggaagtcataatcacagggatccagacccaaggtgccaaacactacctgaagtcctgctataccacagagttctatgtagcttacagttccaaccagatcaactggcagatcttcaaagggaacagcacaaggaatgtgatggtttgtgtgcatatttctatctgaatctctagactctagacttggcctagaattattatgactatacctaatgattatgtattttaaaaaatacctttctgggtattagaaatgtgaatggctttctaagggtcatatggagaaaagcagtaatatgataggtctgtgtcttacaaattaaagagagaagcagggttactgaaacttcaaaaccccacaaaactttaaaaaatcattttatcatcaaacaaaatacccagatttctcagactggccaatggtatacggcagagtagaacatctggtcttgcgcctcaaggagctcatgctaaaaattggctaccaagacttttgattttactattgtagtttgttttgttctttatttcagtgtacctgaagtaaatagtagtgttaatgctagtaagcctctgaggcagtgtgattctcagactttttggggggccatgcctgaggaatgacattctccttctggttcttccaggggctcagccataagccctaactcttctcctcctctctattcccttccccaaagaagtctgaatgcaaggagtctgcctgccattattataccaataaccttgagtctgtttctgcttatattttatataaaattatttactgtttattagttacctatttttaataattatttatactatgtctcagaaccattgaaatcctaaattatggttcttactaatcagtattatgagagaaaacacagattgcagttgagtccatagcataaagattttgtcgtctatgttcatgagaggatattggtatatagttttatttttttaattgtctttttctgtttttgataccacagttatactagctttcataaaactggtaagcatgctcttttctacattctaggagaaaatgtctgcaattggtaataattctttaaatatttggtaggaatcactagtgaaaccatctgggcctgcagatttctttttgggcagtttttaaattacagatcctatgttctaaatagttacagggctattaaaattatctatgtcatattgggtgaattgaaatactttgtatatttcaattaactggtcaattccctctacgttgttaagtttatatgtgtagagttgtttgtatattcccttatcctttttcatgtttgtagtgattttgcctgtttcatctctgatattgtcatctgcccctcctttcttttttgtgtgaatcttgctagagatttgtcgattttaaaaaaatcttcttggccgggcgcagtggctcacgtctgtaatcccagcactttgggaggccgaggtgggcagatcacgaggtcaagagatcaagaccatcctgaccaacatggtgaaaccccctctctactaaaaatattaaaaaaaattaggcagggtggcgtgcacttgtaatcccagctacttgggaggctgaggcaggagtatcgcttgaatccggaaggcagaggttgcagtgagccgagatcacgccactgcactccagcctggtgacggagtgagactccgtctcaaaaaaaaaaaaaaaaaaaaaaaatcttttcacagaaccagccttgttttattgatttttctctattgtttttctgttttcagtattaccgatacctgctccaatcttctgttttaaaaagttggctttttctgacattgctctgtcaggaaaaggggtagggcacagcctgtttactgccaagtgggggtcaaagtccaggttccccactccattgccacctaagaagggattgttccttggtggctgggtgggaagggaagttccccatttggcctccactgatactgcaggggcaggagcttcattaggggctggagatgaaagccctaaatccctacatggccttttctgacacaaccccagtgagggtgtagggtgcctctttagcctcaggagcatagaagtctaggctccccattcagcctttgctgttgtgggttggggaggggcctcaggtttttctgtggtgtttgactaaaggacagaagtcagtgtccaccagttttctatcatatctcgctatgctgccctttactggtactttggttagagaaagcagattttatttgggctttttcagtctgtactcattggtgtttccaggttgccggcttcttcatctctaagtctgggatttatgaggcaaaaagaaaattcaagacactgatcaccattttgttccttccgagaaccctagccagtctgtcttctgagctcttttcagggtcttatgtttctctgagctataatgtccaaagtttttagttgtacttagcaggaggaatagggcaaagtacatatatacaatcttcctggaactggaattatccccaagtatattttataaccaaattgatttagtttggaccccatgaaaatgtagtattacaatattaaattagatcaaaattttaatataaagtcactttatagatcattgttacataactaaactttcctcttttcttctagtattttaatggcaattcagatgcctctacaataaaagagaatcagtttgacccacctattgtggctagatatattaggatctctccaactcgagcctataacagacctacccttcgattggaactgcaaggttgtgaggtaaatggtaaggtacaaagatgcattattttctcactgccactcaaagaatcaagatttgggaggtataggagaatgagtagaatttttagttcttttcagtgacttaggctcctaggaaaacctttgtgaaacagaggttctactcaggtaaactctcagtgtgatctagaccaagaatggttctgccaatcagagtgccgacagcatctctgtgaagaaagtgcctggattatatagacacatcacaactctccaaggaagggctctaatttggaattacctccatcagcccattttcaataagacctacctgagattcaaactaggcctgactcttccaaagtcctcaggtcactcaaacttcaatgtcatgacagtatctggcaacatcactgccatatatatggtgttcaatgagtgtttttgaaatctgaattggcttcccaacttcctgaaaccacaattcttctttatattttctttcataccctgtgtaggtactcaagtcttttctatgttagctgctatttctcaggggctgtaatgtgacctgtggtataaataaatccaggtaatcataaatggtcataataaaattctactatatatagcaaggatgtttaagagtcttaactgttcttcttggactcttaaagcagtgctttccaatattttttacttcaaagcacacaaagaaaataatatctgcctggcattctgaggtaaaagaatgaagcaataaatctaaggcttggctgatccaggccccacttggctgctgaagggctggaggtgggaagagggatcaataaataggtgcactagaaacctgccgtggcacacctgtcaggagttgcagtacttccctttgggtggagagaagccaccatgattcacaatggagaaagtagctgaaacctggaatcagtttcctgttgaagcagataatggcacagtatacccttggatggatatgggtattttgccaatgtccagatagcagtagtctaaaacatctcccaaataaaacacagatcttgtatcggcaggaccactccttgaaacagttccataagtcattgcgtttttttctttccatatggtataaatagatttgttcagatcctaataaactaccctaaaatgtgacattcaattctgctaacttatttaaaacatctattttttatacaagaagcattattttcttcttattcattttcttgatacttaggtaattattagcagtgggtattatttttaggaccctttgtttttttcatggagaaagtaaggcatcacttcaagaaaatttctgcatgatttaccaacaagaacaaagtgtcacagagatgatgggtggtcagccaggttcactcactagctgtgtttcttacagtcacaggtctgccttgctgcctatgatattcaaattacaccttggaaaaattccaaagggtacataactcgaattaccctctaagggttgaaacagaaaatattaaatagtgactgagggtccattgtatcttcttggtagcttttgttagaagaaacagagtatttttatatatagataatttaggattattgtcacctgaaagcaaagaccaaagtttccaagactctcagaaggaggaagtgagtttaaatgtttagaacatggtatttggtatcagattgtctgaactcaattcagtttctgattcttgtggctgtgttaccttagacaagttactgtgttttggctgtactaaaatggagatatttatgagcattatataatacatgtaaagcctgagaacagtatttggcacttggattcaataaatcttcattgttgtggttattgtttttgtcatttgttggtagtaatattatttcttatctcctctgcagtgcatgaagccatgcagggaatattggtgtgtaattaatcacgttacttttcttttgataggatgttccacacccctgggtatggaaaatggaaagatagaaaacaagcaaatcacagcttcttcgtttaagaaatcttggtggggagattactgggaacccttccgtgcccgtctgaatgcccagggacgtgtgaatgcctggcaagccaaggtcaagtatactctatgcatggtgttctcttagggctccagaagaaagcaaaggccctcactaccacaaacatggaggatctgggaagcaggagtattttaatctgtttctgcagattaaaatcctaggtccaagagtccaggatgtctgtggacttgatagctttgactataactttgtctcagagagaagtcatttatcatctctgtggtttttggtctagtcttgatttaaaccaataataagcaaattaatttttctgcaaagggatagatggtaaatattttagtctttgtgggccatacattctctgccataactactcaactctgccattgtagcagtaaagtagccataaacaatatgtaaatgaatgagctggctgtgttctaataaaactttgtttacaaaaaacaggcagcgggccaaatttggcccatggatcatagtttgccaactcctcatttagacagcttacattagtgataaaaaaatgatttagatttgcaacatcatctcttattttttctttacaatttagcaatattttttcattttcctaaatgaaatgtcatctaaacttttttgttctcttccccgccctccttattttaagagctttgtgatattccttgaggcaactagaagcatagtaaaatgttgcaaaaccagagttataaaatcagtgatctaagttaaacaaacaccttccagagagttatactgtccctgatattagcccactgagtaattcaggtgatttaatttgggggtaactcttaatatttgactcatttttattaattctttaaatgacctgagatatcagaatggcatgaataacttgatgatcccttcagccaactaaatccaaattccctaatttctatcctcatatctccctcccttaagatacctacactccaatttcctggctttctatagaattccagggcctatccttaaattaggccactagaaaggaaaaaagaattgtggtgctggtggcgtaaatagaaaagattggattccacacagtcttgggaactgatatctgtgtcttgaaactcattctggcccaatatggaatcacagaatgttacagtagcaaggagcaaagcatctggtctagatttttccttttaattctaaatacacaggagattaaataattttagcttagtttggtagcagaatcaggactagaatcccattctcccagtaaacaggccatgctccttccaccatttgaagcagcccaaatacctcattttgcaattttgcagagggcaaagctgacacccagagaagttaaaataataaaaatagtgttatattacatttatataatttacatagcaatataaataataattaaagagatgttatccaattctttttcagatgactctttagacttgttcatggtataaccttgtcactccatacttcattttacaatcttttaaaaaaatttgcactctctataatttgctcttagtctttgtgatataacaagggcctcaaagataaaatgctaatttttaatggtgtcatttcaaagttagaattcgggatcagaaatatgtgttttacttaacccccttccattcacatgaaatgtctttatatggtctctttagagaggttgaaaatcaaagctggacatatgcagtgatgcacatagatgctgttctctccataactaaaatgtctctacctcttttatgcctgtgaaaacctctagctggttatactctgcatcactggtacaaccttgatatgaagacacactaagataccacccagatgtcactagaggatgttatagacttaaaagttttctcatataatcattctaattcagttaatttgcttttaaaatacatatagcatgtgaatttttgtgtatacacatatatacacatacacctatatatacacatacacttatgtatgtgtgggtgatgttgaagaaacatatcaatattatttcctttagaattgaatgaggttatggtagacgataaatctcccaaaggtaaaaatttatcttagatgactctaaaactcagtttagaccttctgatctttctccaaacacatatcaccaaccatgtgattaggcattttgttaggccagagacaggacaataactgtactgtgtatcaagctctacttatggttttatcaggtctctcaaatgttacatttatttgaaatattagaagaaattgaactatttctgctctttgacattaacagggggaaagagaagttgtgttttgtaaaacaggtgaaatagagagagaatgctatccaattatttcccagataaccctgcagcaatattaccagagtatttaaagaaatttgcttaagaaaataatattcacagataatttagcagtttaattatttttccaaataaagctcatttattcattcatttattcaacaactatttattgaacaccaactgagtgtcttaacattgtggtgagtaccaggaaacaaaatgaaataagcctctacccttaagcagtaaggaatgctaagaaggaaacaattatagtacaatgtgtgaaatacttcaataaaaatttacacacatattgtggcaatgaagaagaaagagggaaagcttctaggagactgtgaatcctaagggataagatagaacaaaatccttttgagctctgtgcttttttgcataacttggtctaaaaaaaaagcaaaggttttaacatcttccttatctatgtgtttttgtcattttcataggcaaacaacaataagcagtggctagaaattgatctactcaagatcaagaagataacggcaattataacacagggctgcaagtctctgtcctctgaaatgtatgtaaagagctataccatccactacagtgagcagggagtggaatggaaaccatacaggctgaaatcctccatggtggacaaggtagagtggcatctgggcaaagagaaagcaatctgaagactgtgctataatgagaataacagtattttgcatttgacaaatatgcagtgacatgtaccacctctttaagtcttctaaatcttagttcttaaggtgcctggtctcagacaaactcctggttgtctgttttggtttgttttatttctcactacaccaggttgccctcataggaggataaatatcattgtcataaaaaaaaagagtgattttatttctggtgtgtgtaaaccttggggaacttgctgatgatggaagggggaaagttatacactttagttgaggatataaggtacatgccaacaagaataaataaattaaaatgcatggtcacattttaaatgttagcaatagtcaaacatttattggtggccacttcctggcacttactatgcacttacgttgacatacatttttaaatatttacaatgacttctgtgaggtaaaatgttattatccttattttgccaatgaggaaatgaagaatcagagaataagtaacttgttcagtcatacagctaatacagacgggctgaaggcagaaatggttttgcagctgctccacagcaccatgtgagacttgtttatttttcactaatttaagtcagatcactggtgagatgaaatctatctggcatgtgatttcataactgatagaggatcatctctgtgagagtgttctatgtgttctttgatatgctcattttgagctaataggataaaaaattttctgggttgggcatgatggctcatgtctgcaatgccagcactttggaaggctgaggcaagaggattacttgagaggagtttaaggctgcagtgagccatgactgtgccactggactcaagcctgggcaacagaataagaccctgtctaaaaaaaaacaaaaacaaaaaaccttagccatttatgttgtcattaaagattttctcttatttggctttcagatttttgaaggaaatactaataccaaaggacatgtgaagaactttttcaaccccccaatcatttccaggtttatccgtgtcattcctaaaacatggaatcaaagtattgcacttcgcctggaactctttggctgtgatatttactagaattgaacattcaaaaacccctggaagagactctttaagacctcaaaccatttagaatgggcaatgtattttacgctgtgttaaatgttaacagttttccactatttctctttcttttctattagtgaataaaattttatacaagaagcttttataatgtaactccttgctaccagtaagtaagataatggctattacttctgcattaatttgaatacaggtaggaaaatatcaagaaccaacaagaaaagggcttatctttcttaatgattgaaaatgctatgaagtaatatttatgtagttaaaatgcttcattataactcttttaaatcctttacacactagtaaaacagatattactttaaataataattgatagacctggataactttcacaaacacatgattttttaatggtttttcttgagtgaagagaaaaacaatattatcaaatgaaataagtacttaaaatatcctgtctttcccatataacaatgatttttctgactttccatgagtaaaaaaacagccaagcatctttccagtagccccattgaaattgtgaatccgtcctggtctccctaaggactgcacacattgatattcaaggttggtggtcattagatatggaacagaactgaaataaccatggtagaactgaatgtgtaatgttggctttattctagctggtactacatggcacacagtttcaaaacataatttcacctactggaaagctcagacctgtaaaacagagcatgggaactgctggtctaaatgcagttgttcctgctcaaagagacctctggccaaactggcaagcagttaaagttttctttcagggccttcctctctatggcctcaacttcctcctctctcttcttccagcaacttcccctttcatcattcctttccctggggacttggcattcagtgatcctgtagatattgcacaactggggaacctttagacatccttaaaatcacatgagatagacagtcatttggggtgtctgaaataaaccaccccaaaacttagtgttaaaagagcaaccaaaaaaaatttatgtgagattatggatttgttacttagcttgatttaatcatcctgtaacgtgtacatatatcaaaatgttatgtataccataaatatataaaattttatcaacgaaattcataacaatctctcagaccacagagaaatcaaattagaactgaggactaagaaactcactcgaaaccacacaactacatggaaactgaacaacctgctcctgaatgactactgggtaaataatgaaattaaggcagaaataaataagttccttaaaaccaatgagaacaaagagacaacataccagaatctctaggagacagggctttgcttttgctgcattctattcgttgtgaacacaaattacaggccagtctcgattcagtgtagaagggaactgcataaggaccacataccaggaggcataattcactgggagcatctttagaaactaccagagttacctgttgcccataccagtggggtaagccctatgaatgtatatgagagtttcaaacatccacaaaacattggctttctaatattcgtattcccactattcctttcttttcatgattcatgtcattgtcccatcaacatttctaagatttccattccgttaagagcaaaagagaatgttggaaggtgggggaaaacatttctttgttttctacagggccagcttcttggatgtgtgtgatctgttcagttgcaaagggtcacatgctcagaaggaccgcatgctaaatttaatgctttgcagttaccctcttgaaatcctttattttttaagaaggaattcgacatttccatttttcaatgagccccacaaattacgcagctagtcctgggcttctctactctgaaattgggcaggatctctcttgatctagaatttactaaggcataataggggcaagaaaatcttatgaaataatggggggtagggaagagatgggaatggagcatgagatccagcttcgttattctctacttgagaaaaataaggccccaaagattaaacaacttgcccaaggatattgcttgttagtgtcagaactgaaaccagaaaccaaatgatcatatccctagacttttagtctgctttctcttccataaaatgaaacttataatgtttctaatccattgctcagacaggtagacatgaatattaattgataatgactattaattgatctggaaaatacttgtttggggatcaataatatgtttgggctattatctaatgctgtgtagaaatattaaaacccctgttattttgaaataaaaaagatacccactttttat

SEQ ID NO: 467 - DNA, 9346 bp, Homo sapiens
  source 1..9346: mol_type = genomic DNA; note = NC_000011.10:c65662946-65653601 RELA [organism=Homo sapiens] [GeneID=5970] [chromosome=11]
gcagtgacgcgacggcgggccgcgcggcgcatttccgcctctggcgaatggctcgtctgtagtgcacgccgcgggcccagctgcgaccccggccccgcccccgggaccccggccatggacggtgaggtcgccctctgaccccgcggggtggcatcgccggggccgccgcggctgtggcgggagcccccgcgccgctttccgccccttcctgcgccgacgggcgctgcgcagggagcggtcggcctgccggatggtggcgcggggcggggcaggcggggaggggtctgactcagtttcccctctgggtggagggggtggcccttgactcagcatcctccctgggtgggggagcagagggaaccttgactcagtttccctccacaccgtccatgggggcagctctggcttcgtttccctattaggggagaacgcatctgattcagtttcctctctggagggaggtggggcgtgccctccctcaattttccttaagaaagtacaacaggccctgattcagcttccctctggagaagaaggattccttaccccgttttccctcaagaagcaggtgtttctggttcctttcctccaccccttagtttcaccgcaggttctagggagcaggtcctgactcagttcccctgggagggagcctggcttctcctctccgtggagagcagattcctccttgtgagaatgggcattgggtgtgtgctgaccctgatctccctcccctttcagaactgttccccctcatcttcccggcaggtaagtggcccccgcggcggtcggggaggtgctccctggggtagggcagtgggggcagccgcctaatggggctgcggtgtcccctggcagagccagcccaggcctctggcccctatgtggagatcattgagcagcccaagcagcggggcatgcgcttccgctacaagtgcgaggggcgctccgcgggcagcatcccaggcgagaggagcacagataccaccaagacccaccccaccatcaaggtcagcactgcgccagggtgtgcggggaagggactgtggaaccccagccctctgtgtttgggagtcaggtttggatgtctgggcctctgtactttggacagatcaatggctacacaggaccagggacagtgcgcatctccctggtcaccaaggaccctcctcaccggcctcacccccacgagcttgtaggaaaggactgccgggatggcttctatgaggctgagctctgcccggaccgctgcatccacaggtgaggtccctgcaggctaggaggcccagcatgaggggacaggaggcgggctatgaagtagccgctacagtgttactcctttctggacccagggcagaattcctcactccttgccctgactcagctctgcaagtaaactgcctttgtcttgaaattatctatttgtacgtttactctagcagatgagttccaggggatacggatgggtccctaatcacttctgaattcctgacccctgtagctggaaggacaagtccctcagagtcacgtctcttgtttgaggaagaaaaccattgaaccagcactctcccctggagttgacattgcagttgacagagacaggctgtaaaaaaatatacaggccgggcatagtggctcatgcttataatcctagcacttcgggaggccaaggcaggaagatctcttgagcctaggaattcaagactagccaaggcaacatagtgagaccccatgtctacaaaaaataagaaattagctgggtatggtggcatgcgcctatagtcccagggaggctgaggtgggaggatcgcctgagcccaggaggtcactgctgcggcaagctatgattgcaccactgcacttgggtggcagggcgataccttgtctttttttttttttttttttttttaagaaagagtcttgctctgtccccagactggagtgcagtggcgcgatctcagctcactgcaacctccaccttccgggttcatgccattctcctgcctcagcttcccgaatagctgggactacaggtgcctgccaccacgcctggctaattttttgtattttttagtagagacagggtttcaccgtgttagccaggatggtctcaatctcctgaccttgtgatctgcctgtcttggcctcccaaagtgctgggattacaggcttgagccaccgcacccggcccgacactgtgtctcttaaaaataaataaatacacagataaataaacaaggtgctgtcagagtaacagtttcagtcctgaaaataaaacgaggtcataggatagaaggataacctggggtgggggagttaggggagctggtgtgtgatgactttagattgggaggtcagggaaggcctccctcagctaagacttgaatggtgagaaggaggagagaagtaggaaaagaacattccaagccgaccaaacaagtgcaaaggccttgaggtgggaatgagtgtcctgtgtttagagagtggaaaaggagccccggtggctgtaagcagggagcccacagggaggctggcaggggcaggggcacggaggtgcttgtcagctgagtgaagggacagggttcgttgcagcacagtaggaagccactggagagggttaggcatggagcgatgatctaggggtgggcagagtaggaaggagcaggctgggcaaggcaggaaggtctgggctctgtgagagacagtgggacagacgactgggggcgctcagtttccagaacctgggaatccagtgtgtgaagaagcgggacctggagcaggctatcagtcagcgcatccagaccaacaacaaccccttccaaggtgagggcaaacctgcctgccacacccgcaccctctgtcaccctccccagcccgcctttcctgcatctccctcactggccaagacacagtaaagctggaatcttggtgcccattcagtactctcccactttaccactgggaaactgagtcccaggaggggacatgacattcaggccacagtggagtcagtgctgggttctgcctcctctaggacttgtgtttcacacacgcaccagcggccctcccagcgcagagctccctgcccccactgatagcacctatatccccacttcccctgctctcctgatcgcctgttttcttggcagttcctatagaagagcagcgtggggactacgacctgaatgctgtgcggctctgcttccaggtgacagtgcgggacccatcaggcaggcccctccgcctgccgcctgtcctttctcatcccatctttgacaatcgtgagtagcgagggagacgcaggaaggggagagggtgggcctgaataggaggaagggggttggggtgagtgtggcctgcaagaggcgctctggcttcattcaatcatcttgcgtatttgtctactcttctctgcccagctctttgttggctggggagagagggcaaagaagacccagagctgtccttgaggtgtagctctggcctggcaggaagtctagcagagagtctgatgggagatgggcattttcagtattgtgtgatgagaaggtggtgtgcccacaactgcgataatgactctaggaaatgaactcccaggaacaagatagtgttcgagaatgatgattcagtgatggaagcccacagatgaattgggctgactgatcagctgcagtctttagttaagtaaccagcaggatgaatggaaataaaacgaatctggagccccaaggatgggaaaccaggataaactgggggtcaggagggaagggctcattgccaaggtgggtatggactggccttaaagattgctttggtcaggtggagaaagagtgtgatcagattggcacccactggactataagctccgggagagcagagaggtttgggttttgtgtgtggtcgtattcttgcttagatcagtgttgagtgcacagtaggcaaatacttgttgaatcggttggggtgaggagctaataagaaggtctgactttggctacaaaggtgtaggtggcaagctctgggcaaccttgactctgggctgggcagggaagttgcatctcctgcaggccaccctggggacctctcgtggctcaggtcatcctcccttgttttcactgcctcaggtgcccccaacactgccgagctcaagatctgccgagtgaaccgaaactctggcagctgcctcggtggggatgagatcttcctactgtgtgacaaggtgcagaaaggtatacatcaggaggcaggggtgggctcttgggagcaaggggtgaagctgagcagagaagtggagtgtcaggtaactggctttggatacttcctcctgtgcctcgggggcctcaggtgggccgaagggtgatgtatcagaagacaagcatcagaagttgagggggagaccatggagggttagacacactgacccacactgccaccgcatctcctgcagaggacattgaggtgtatttcacgggaccaggctgggaggcccgaggctccttttcgcaagctgatgtgcaccgacaagtggccattgtgttccggacccctccctacgcagaccccagcctgcaggctcctgtgcgtgtctccatgcagctgcggcggccttccgaccgggagctcagtgagcccatggaattccagtacctgccagatacaggtacacagctggggtggcagcatcagggcagctgggctctgtgccgtgagagagaggccaagactgcatgtctggggctgtggttgagggccagaagctggagtcagagcttgggatccaagaaactggaatccatttcttgcctcatttaataataatgatacctcagacattgagctagtactacacatctgcccctattccaggcacttcactggattacctgattttaatctcatgacccttttgaagtaggagatagtgtccaacttgcctgggttcacgtggctagtaagtagcagagtctagcagagtcagcgttggaacccaggccatctggcttcaggatccttttgccacactggttgtcttgtcactaccatacagcccagccacattttggtcgaggtttgagtgtccacttggtaccagggcctgtgccaggtattgtgaatacaaaaaatgagtaagacatgctccctgcccttcagagtctcagtcacttgaggaagacaaatgtgcaaaacagatccttaagtcacggaatgacatgtgaaatggaggtgtgcgcagagaagcacgggggcacagtggcctccggggagctggagacagctgcatggagaaggtggcattgaagctggagaaagacacagaagtgtgttctccaggcaggtggcccagcacctggaagggaaggggtgttggcaactgcacggcctattcagggccaccttcgtggtttgagctgatgttgggcagtgagcaggctcagagattggagggcctggttaagctgaaggcctctaagcagagaggtgacaggagcagatttggaagttgactcaggaggccacgtgtagaagatcagagacagacagactcaaagcagggaggccattctggaaatgttgctgtagtccaggaagagaagatgcggcacaaaccttacagaaggaatagcagagcaagatcacatctccaccactgtcctcagttacccttcagccctgcagccgttttgcgtcttacagaccaagctcagtctcacctcaggacctgtgtctagctgttgcctctgcttggaatgcccaaggttttaatgcaagtggctcatgccagtccttccctgacctctaaattagcccttccctctacatttagactgtcctgacctcacttccagtattgttacatcaccatatcgtccctggaccaccgtcacttgagattttctggtttggttttgtttgtttgtttgagacagagtctcactcttgtcgcccaggctggagtgcagtggtgcaatctcggctcactgcaacctccacctcccgggttcaagtgattctccctgcctcagcctcccgagtagctgggactacaggcgcccgccaccacatccggctaattttttgtatttttagtagagacggggttttcaccatgttggccagggtggtctcgatctcttgacctcgtgatccacccgcctcgacctcccaaagtgctgggattacaggcgtgagccaccacgcctggccgagattttctggtttgtatatatgattgtgtccctctcactttttcactaggatgccaactttttgggagcagacaccttgtgtgcatactcacggccacatccccagtgtctagaagggaggctggcacatagtaggtgcttgataaatatatgtcaagttactggcggggagtgagagaaaagaagataatcattccaaggtttctagctttggtgacagggcagatggcggatggtcagggaatgcaggagaaagaacctagtttttgagggatgatgaggttgtctttgaattgatggaattgaagtgctttggagctactgaaataccactgtaattagaaagacagttctgaaagctctgactaaaatatgaaaccattagagataagaataagagtctctgctgaagtcttaaggcagttgtgcctcagctgccccagagtgccaagaaattctcgccaggcctgggtggaggctgacaatgagccaggatgtgagcagtgcaggaaggtgtgagctggaggctggggccccccaggtctcctctttgcccagagcatggcccctgtactcggcctcaccatgtggtcttagaggggcagattcagccaacagaggcctccaaaagctgtgggattctcagaactgctgagtgtcacacatcccttctcattggcagagaaggttgggagaatgggtcttgggaaagcctggctcctccccttcctcctgagggacctttgagagcgtcggggacccacctgaggagagcaagtcccacttctcccccttactttcccagacgatcgtcaccggattgaggagaaacgtaaaaggacatatgagaccttcaagagcatcatgaagaagagtcctttcagcggtgagatggggactgggaaagccagagaggaaggcagcgggcagggaggggacaccctggggctgagaactgacctagcccttgccctacaggacccaccgacccccggcctccacctcgacgcattgctgtgccttcccgcagctcagcttctgtccccaagccaggtaaggatttccttttgtcccactggaacgacaggttcagctctgttcagctgaggagcagtggagatgaagactcctgggccccattacagacctactgaatcagaggctttgaaaggatggcgcaggaaccagcgacttcctgggatgctaatgcacactgaagcctgggaaccaccgtgccacttaaattctatattgggtatcttgggaatcagaagttaaaaatgcagaatctctgctctcatctctcacttgaattgggggaacaaaaatcacctctaaattagcaagatgtgtgtgcctgtgcgaggctcaaaaactgacaagctctgcacttcaggccgctgctcacttggtgctccatgggctcattgcctctcaggacttagtttttcagctgtaaactgaggagtccagcttatctctccaagtgtcccttcctctaaaaggctggaagagtttcgtgggcttgagtagtcagggaggactccaaggtggaggtgtggctagaactggaccctacaggctgggtcagatggggtaagaggaaggagatagggtgttggcagtgactccctagagagggattgagcctgagcaccatgaagaggggctggggtacagaggacggggtggatctctagggctttctctgacccctgcctctctgtctctctcctccagcaccccagccctatccctttacgtcatccctgagcaccatcaactatgatgagtttcccaccatggtgtttccttctgggcagatcagccaggcctcggccttggccccggcccctccccaagtcctgccccaggctccagcccctgcccctgctccagccatggtatcagctctggcccaggccccagcccctgtcccagtcctagccccaggccctcctcaggctgtggccccacctgcccccaagcccacccaggctggggaaggaacgctgtcagaggccctgctgcagctgcagtttgatgatgaagacctgggggccttgcttggcaacagcacagacccagctgtgttcacagacctggcatccgtcgacaactccgagtttcagcagctgctgaaccagggcatacctgtggccccccacacaactgagcccatgctgatggagtaccctgaggctataactcgcctagtgacaggggcccagaggccccccgacccagctcctgctccactgggggccccggggctccccaatggcctcctttcaggagatgaagacttctcctccattgcggacatggacttctcagccctgctgagtcagatcagctcctaagggggtgacgcctgccctccccagagcactgggttgcaggggattgaagccctccaaaagcacttacggattctggtggggtgtgttccaactgcccccaactttgtggatgtcttccttggaggggggagccatattttattcttttattgtcagtatctgtatctctctctctttttggaggtgcttaagcagaagcattaacttctctggaaaggggggagctggggaaactcaaacttttcccctgtcctgatggtcagctcccttctctgtagggaactctggggtcccccatccccatcctccagcttctggtactctcctagagacagaagcaggctggaggtaaggcctttgagcccacaaagccttatcaagtgtcttccatcatggattcattacagcttaatcaaaataacgccccagataccagcccctgtatggcactggcattgtccctgtgcctaacaccagcgtttgaggggctggccttcctgccctacagaggtctctgccggctctttccttgctcaaccatggctgaaggaaaccagtgcaacagcactggctctctccaggatccagaaggggtttggtctgggacttccttgctctccctcttctcaagtgccttaatagtagggtaagttgttaagagtgggggagagcaggctggcagctctccagtcaggaggcatagtttttactgaacaatcaaagcacttggactcttgctctttctactctgaactaataaatctgttgccaagctgg

SEQ ID NO: 468 - DNA, 140719 bp, Homo sapiens
  source 1..140719: mol_type = genomic DNA; note = NC_000012.12:c95217467-95076749 FGD6 [organism=Homo sapiens] [GeneID=55785] [chromosome=12]
gctagtgctcgcccgcccgaccccggcggctcgcgcccgggagcgccgcagggtcgctagagtcggccgcgtcctttgtgtggcgctcaggctgcgccgcggggcggcgggacggaatgtgggcgctgcgggggcttttctctcctacccgaactgtgggaacaatggactgaaaggggaagatggattgaggggccgagcggggaagcgagctgcaccggggaatcatgacttctgcagccggtaagtgacggcgctcgcgctgccgcgggaaagtttgtggcgagcgctgctaggcttgggctcgcgagcaactttcttcgccggggtgggcgagttgtgtgccccgtacctttgccgagcacctcggcaagcgcggagctaatgggattcgctgccggctttctcgtcttttcctgcccagaggggctgtttggaaacccgggatttctcgggatctcccttccaagggggactgtgctgggggctctgcaccaggtgaaatgcgatgtgtgaagggcgttcgctcatctctccagcagtgcgaggacttcgcctttgcatgtgaaaatagtgtagattcccaagttaatagatcagttattataggtaaaggcagtgttctcagcgtgttcaatttggccactaagtgagtcgctttcaaccttgtatctgctggtaaaccttttacccattttaaagaggcgtagacattgtcatgtcctggtggttttacctctgttacctgagaagcagaggagttgagattgttgaggttttttttttttttttttttttgcttgtctgcacccaattacaattattttgtttgtttctacctgattagggtaaacaaagctttattttctgtctgcctcccatagttctttccccttcatccaaatgacaaagcctctatctttgtgtggattttcagcaattctagacgttgtgtttctgaacattcttaaggaacaatttctgttttacaaaataattaccaaagtggtgttacgttcacttcgtaagtacataggttaatttttaaaccagaacttatgtattaagtagagtgttatgggttattttacgtttttgtccacgttgaaactttcattagaaattttatagtgaaatagtttaaagcttcttctcaaggttacttccagaatcagcacttaagtatcagattaaattttcattgcttttcttggcatttgtttaaaattcttgcaacttgaaactgtccaacagcactcaaatgttctgatttgtattatttctaaagcctagatatattgtagtgttgcattgctccctgtgatcagattacaacaaacgaaacaagaagttagccaataggaaaagaaagcaagaagtgggtgttgtgtgggtctttcctttttgatgttatatgcacttatatgagatatctttataaactctcttttctttgccaaagggaggctttatacttacataaggtaaattattttcatcctacatttctgtgccttaccttcgttcaagaaattgatttaaattaaaagtggttggaaattttaaaatccttccagccagttttagctctttcctttttggaggtgtcaaatgtatttaaaataaccgtgtcttatatgtatcagttttcaattccagtcttaacagtttataaggaacaggcacagaagcatgtaatttcacatttatgtaaacccaatttctagggcccagactggaagttcatgattcttgcatttgaattatcctaaaataatgcaagctatttttgtattttatcaactttacaattaaagaaatccacagaaatttttgtggtgtttaaagtgggacacttcctgtgtctagccgagttggttggtttttagcattgctggctgagaagcatcaactacttttttgctcacccatctgttggatttatcataattctttctggtgtctagatggggaatatggaagagaactggggttttatttctacccattcttatatgtatacatagttcttacaagctgattatggtgctttttgggaacaatagtcaaattcattgaaacgtttaggaaagttacttgaagttaagggaggggatttttgcttttgaatctaatctgtggtatttggaagggttggtttaatttaagaaaataaaaggaatgttgtagaacatctaggttatatgtatccagcagaaaagcttgctttgtttttctacatctataaaataatctgcccttagtggagatttcagaattattttaagctgtatatgaaaaaggagaggctgggcgcagtggctcaagcctgtaattccatcactttgggaggccaaggcgggtggatcacttgaggtcaggagtttgagaccagcctggccaacatggcaaaaccctgtctctactaaaaatacaaaaattagccaggtgtggtggggtgcgcctgtagtcccagctattcgggaggctgatatgaaaattgcttgagccagcgaggcggaggttgtggtgagccgagatcgagccactgcactctagcctgggtgacagagcaagactccatctcaaaaaaaaaaaaaaaaaaagaaaaaaggagagagaattataggtatatataggtatatattttgtgtccttttgaacatgtacaggtcactgtcttcattgtctgtgctttgcgttttggctggtccagtagccagagagtgtacacgtgaaccacagccatctgtgtgtaacagatgacgagtatgtttgtaatagttagtaaaatggtactagtgctttactttcttaccttatatttccctggagccaaacagctgtgtaaataaaagatttgctgctttgctctaagaagctttgggtctgactgttgatgcagtattaagatccaaaggtgctagatttattgccaaatgtcatgcacttatttcacattggagtagaccataatataatggcttattattttttgagttgtgtttcttccaaaatagagccatgaaaaaaaaataatgaaggattttggatattgctctaccagtgacttagttgaacacttgttcctattaataattaaggaatttttcaataatcgtattgaaattgattcctgctaacttttcaaaatattattctacattaaaatggatgtacatttttgaatgtgattatttttaaagaagaaattttctgttatggagacatattaaagagtatgtgtatgtggcagctgtgattattcccaggccctgttgttagcactgggatacatcagtgaatgagacaaagtgcctgcccttctggagcttgtgtcttatgctgaacacagacaaaggtgaactgaaaaaacatcaacgcaggagacagaggccacagtacatgaggttcttctgaaatgagtgtctcagaagttatcatctcagattcctatgggctttagaggcctgttcaactcccccatttataaggaaggaaagtgaggcagccaggtctgtacaaggcccacaattaggttagccagctccctgagttatgtctgtgacttccttcaatacacagttaactaacaatggcaagcccaagttcacagttattaattgaattcagtgagtatgcgttgagggttttatgtacgtaataggactttgctatatttattgggaatcaactccagcacatacgtagttaattgaatttctgtgacactagaacaggaatttatatctcttggaagcagatttgtgtacaaaacgcattttttaaaaagagtaaaattggtaccagggattttttaaaaatgatatttaaatgaccctaaagcttctgacaaggttctaagatacggaaagtaaaagattaatttgatgagagatgaagttttcttccaactgtggtaaaatagcacataagataaatttaccgtcttactcatttttaagtgtatagttcagaagtgttaagtacattcacatggtacatccaatctcaagaactcttcattttacgaaactattttttttgttttcatggagacggagtcttactgtgttgcccaggctggtctccaattcctgagctcaagcaatcctcccaccttgccctcccaaggtgctgggattacaggcatgagccactatgccaggctgccaaaactaatttttaaaaaattctttgaaaaatcccagaggtaggatgttttgataatggttacagaaataaaatcaacttgacagtcgtactgagtaagatgggccgttgggaagaggcctaaggcattcatactttctcttaagacttgacttactaaatggagggtttgatttaatagacatttacaactaggtttctcactaggatttgaagggtttttcagttattttctgcctaaaaaaaactcagacaaaattaactatgatgattgaacagctaactgaaattatgtagtataggaatttgcattattttgaaaataattttttattgatgatgacattatacctagaaattgagtgagaggacatgtatcatcatatacatcatataatctttattgcacacatagaagtagagatttagggaattcttccttggttggtaaaaggaagtagagcaccctactcctcttttttttaaaaaaactcagttccgtgtaatagcttcccaagtgtcgtgactaatttcctttgttcaaaagtaagtcatcaccaaatgaaatatcagagcccctgtctattcaagtaattaaacaacgtccagcagtcctttgcagcagatattttgaaaagttttttcagtaaattaagtttttattaagtgttagatcctgtcaaacgaacaaatataaatgtaaaagataaaatattttttatgacatgtctccttggggaaatgtggtcaataatatgacagtgtaggtggaagaacataaaggaacttacagatatacaggctttatttatcttttcgctttataggtctgttgtgtaaagcttttattaggttcctatagtataggagcagatctgtaccgatgcagcattgtataataggtgttagttaaataccttatatataatgtttaggaagaattgctacactagaaattgtagttatcttttaaatgtagtagaacagtggatgttaatgagggataaacaacataacctgtggaacttaaaagatgtacagatgtccaggatctatccccagaaactaactagttcactctagggtaggacctagacatgtgactttttaaaaaatagagctccgtgaaggaatataatgaaaattcccaaccaataactcttggagaaagaaataccaggtttattatgagccttaaataataccaaagaattaattttcagtttttaaatttagaaaatttctgatttctgtcttccttttttaatattgttttggggttctatctatcgaggtagacagatcattgatcattgatctgaagtttaaagagctgcatcctacatttaacttaggcaaattcaactttcagcacttggcaaatgaattgaagaacaactatgtgggtcccaaactgaagtcaattatctcattttttgtcaatgaaagatatgatgggctgggcgcggtggctcacgcctataatcccagcactttgggaggctgaggtgggtggatcacgaggtcaggagtttgagaccagcctgatcaacatggtgaaaccccatctctactaaaaatacaaaacttagccggatgtggtggtgcgcacttgtaatcccagctactcaggaggctgaggcaggagaaatacttgaaccctggaagcagaggttgcagtgagccgagatcatgtcactgcactccagcctgggcgacagggcaagactccgtctcacaaaaaaaaaaaaagaagaaaaagaaaaaaagatatggtaacagttccaaagctggagaaacaaactgtattggatttatttaaaaatgtacaatagacccaaagctatgtatggaattgaaagacaatttaaggaattttcaggagtaatattgatactatataatgtaacatactcagtaaaaggcaaggtcatattgttaaaaataaaaaatgctatcagatttaatcatgtatcattttgtgctttggttgttttgacatcaaattattattttttcctttctagagataaagaagccaccagtggcccccaagcccaagtttgttgtggcaaataataagccagccccacctcctattgcacctaaacccgacattgtgatttctagtgttccacagtcgacaaagaaaatgaaaccagcaatagccccaaaaccaaaagtcctgaagacctcacctgttcgagagattgggcagtcgccatcaaggaaaatcatgttgaacctggaagggcataaacaggaattagctgaaagcactgacaactttaattgtaaatatgaaggcaatcagagcaatgattatatttcaccaatgtgttcctgcagttctgagtgtatccataagctgggccatagagagaatttgtgtgtaaagcagcttgttttagagcccctggaaatgaatgaaaatttagaaaacagtaaaattgatgagactttgactataaaaactaggagtaaatgtgatttgtatggtgaaaaagccaagaaccagggtggggttgttttaaaggcaagcgttttagaagaggagctcaaagatgccttaatacaccaaatgccaccttttatttctgcacagaagcacaggcccacagacagcccagaaatgaatggtggctgtaattcaaatggacaattcagaattgaatttgcggatttgtcaccttccccatccagctttgaaaaagttcctgatcatcacagttgccacttacagcttcctagtgatgaatgtgaacattttgaaacttgccaggatgacagtgaaaaaagcaataattgctttcagtcatctgaactagaggctctggaaaatgggaaaaggagtactttaatatcttcagatggagttagtaagaaatcagaagtcaaagaccttggtcccttagaaattcatttagtaccatataccccaaaatttccaactcccaagcccagaaagacacgaactgctcgtctgttacgccaaaagtgtgtagatactcctagtgaaagcactgaagaaccggggaattcagacagtagctcttcctgtcttactgaaaatagtttgaaaatcaataaaatcagtgttctgcatcagaatgttttgtgtaagcaggaacaggtggataaaatgaagctaggaaataaaagtgaattgaatatggaatccaacagtgatgcacaggacttagtcaattcacagaaagccatgtgtaatgaaacaacttcctttgaaaaaatggcaccttcttttgataaagactctaatttgagttctgacagcacaactgtagatggttctagtatgtcgcttgctgtggacgaagggaccggttttataagatgtactgtatctatgagcctgcctaagcagctcaaattaacttgcaatgaacatttgcaatctgggagaaacctgggagtttctgcccctcaaatgcaaaaggaatctgttataaaagaggaaaattctctacgaattgtccccaaaaaacctcaaagacatagcttgcctgctacaggagtgcttaaaaaggctgcctccgaggagcttttggaaaaaagttcttatccttcaagtgaagaaaaaagttcagagaagagtctagaaagaaatcaccttcagcatttgtgtgcccaaaaccgtggtgtgtcatcctcctttgatatgcctaaacgggcttcagaaaagccagtgtggaagttacctcatcctattttacccttttcagggaacccagaattcttaaagtctgtcaccgtatcgtcaaacagtgagccttcaacagccctaaccaagcccagagcaaaatcgttatctgctatggatgtggaaaagtgcactaagccttgcaaagactctacaaagaaaaactcttttaaaaagttgctcagcatgaaactgtccatctgtttcatgaagagtgactttcaaaaattttggtccaagagtagccaactcggagacaccaccacaggccacctctccagtggggagcagaaggggattgaaagtgattggcaaggcttgttggtaggagaggagaagagaagtaaacccatcaaggcatattccacagaaaactatagcctggaatctcaaaagaagaggaagaagtctcggggccagaccagtgcagctaatggtctgagagctgagtctttggatgaccaaatgctctcccgggagtcatcatctcaggcaccttacaagtctgttacaagcctctgtgcaccggagtatgaaaatatacgccattatgaggaaataccagagtacgagaacttgccatttattatggctatacggaaaactcaagagttggaatggcagaattccagcagcatggaggacgctgatgcaaatgtgtatgaggtagaagagccgtatgaagctccagatggccagctgcagcttggacccagacatcagcattccaggtaacaggtgccagacagacacttttgcatgcatcattgcaattaaccttcaacagcctggtgagttaggaatgcagggggaaaaaaaacacgtggttgaaggaatagtttagaaaatgtgtaattattctcaagtgcagcctccttttagcatacagttggaatgggtatttgcaatacaagcttgaagtagttaatttattttagtaaccgattcaaagaatttgaaccagtggcaatgtaggtgctgctgcaaggaaggcgtggaacagagaggtcctgggcctccagacaccagctcagaagtcatatcaggaaacctggggcaggaaattggccaattcaatgacatttatttgctaggtataagaagtctgaagttactgaaatatgtaggcatttacgtgtggtgcgcttatcaggtggaacctccacatttttagaagttcaccactctttgaagattggtcattttacctgttgatggctaattgctgacctcaagtggatataggaaaaatgcaggaaacacgtaactactctttatttctcacttttaaaataatttaattaaaaaaaaattttttttttgagatgaggtcttactctgtcacccaggctggagtgcagtggtatgatcatggcttactgcagcctcgactccccaggctcaaggagtcctcccatctcagcctccttgagtagctgggactataggtgcatgccaccatgcctagataatttttgtattttttgtagagacagggttttgccatcatgcccaggctggtcttgaactcctgggctcaagcactgctcctgcctttgcctcccaaagggttgggattacaggcatgagtcactacactgggcctatttctcacttttgtgtgtgcacttcctacctgtggaatacctactccatctctcttattaaaatcgtgcccatcctcaataatccaccccctcagtctttggcttcattaagcttctacaattacctagtcagaagtgtttacttcctattctgaccacccagttatgctgtgatatcctttcatctcaggctgtcttaatgtataactatttattggcatgtctgatgttctgtatttggttttaagctccatgaagagttctagtcatctctttgccctggataaagccaagcaagaggcctagtagaatcagtagatgttgattgggtctaagagagaatgaatgaaaataggccaagagagcaaccactgcagcggcttccttctctccatagtcgcataggtagcttttccattgtatttctaatgtttgtttgtgtttaacaaaaaagcacatggacccttttggaaatctttagattgttcttagtccactaacttcaggtctttgaaattcaagtcttgaaatgtgacttttctagaaaatacttggcacatagtggggtgtattagtccgttctcacgctactaataaaaacatactcaagactgggtaatttataaaggaaagatgtttaattgactcacagttcagcatggctggggaggcctcaggaaacttacaatcatggcggaagaggaagcaaacacatccttctttacatgggggcagcaaggagaagtgcagaccgaaagattgaaaagcccattatagaaccatcagatcttgtgagaacccactcactatctctagaacagcagcttgggggaaaaccgcccccgtgattaaattacctcccaccgggtccctcccacgacatgtagggattatggggactacaattcaaggtgaaatttgggtgggggcacagccaaagcatatcttgggggctccaaaaaaaaaaaaaagcattgttgggtgaattgaataaataaaattgtcgagcaagtcagcgtaccaagtaaagtaaattattttaagttcctttaactgtcaggtattctcatagcatttctctttactcgtagtcagtctttcctgcccttcctccttttgcctaaaaatggctactttcctcccttgtctaatttttctcacagccagctgcattctgttttcatatttctgcttcctgaatattagtacctaggcaaaaagctccttccttggcataagtacttctttttctttttttttttttttttctttggagacagggtcccctctctgtctcccagggtggagtacagttgtatagtcaaggcttaccgcagcctgtaactcctgggctcaagtgatccccacccaccttcagcctcccaagtagctgggaccacaggggcataccaccacacccagctgatttttattttttattttttgtagagatagggtctccctgtattgcctaggctggtctcaaattcctgtgctcaagtgatcctcccatctcagcctcccaaagtgctgggattacaggcatgagccaccactaccggttcttggcataaatatttcaaattgtctgttttcaggattgctcttctctgcagaaccattttattggtactatcctttttttttttaaacatgcttttgcatatttttttgtgtgtaataagtttggttggcttcttcacaatgtactactatccttgcctaagataaattttttttttaatcactttatttgtgaatgagtacaattttttcttgaaattggaggtttggccattggggtgtgttttctgttggccatcaggcttaaaccctaagggcttaccattatctctgccaatcctggagcttgttttttatctgttatgctgcttagtttgttagggcctgctactcgactgggtggaagctggtgagaaggggttaatggacgcagccagccagtggcataaggagagttctttctggaggccacaggaaaccagggcggctttggacaggttataggctgtcaagtagggcagcctggtaaaagctgggtgagctttgcttttgaatttcgctttccaaggagacttttgtttaggcctgcagcagggagcctgcaacaggcttgagactactaaaatgtgccagaggaatcaaaagccctgagtcatagggtcagaatcacagtattgcctgggaggttgttcctcttgtaaacaacattgaatagaggagaaaagaaattcaagtcttcctgaggaggacaccttgacaccctgagatcaaataaatgaacagtgaggcatacatttcaggtgagctcaaagggtcctgtttggtaatctcgctgttgaaaatacagacctgtgccttagaatacttaattcaaaatccagtacactgactggggttctaaaatgataagaaaaagtgaaaatgaactctgtttaagatttttctgctggggtcatcacaagggtgtcttagtttctcaaccttcagggaagaaagtctgggtcagggctctaattcactgaatcatgtattttacagagtctacacatgtgaccaaccaaattctggttagtaaacagacttttgacaagcttgggtgtagcccatatggtcttattctttagaatatagatgtttcataaatccattgcttaccatttactttttttttttttgagacagagtcatgctgtgttgcccaggctggagtacagtggcaccatcactgctcactgtagccttgacctcctggggttaagtgatcctcccatctcagcctcccaggtagctggtaccacaggcatgtgccaccacacccatctaatttttgtattttttgtagagatggggtttcaccttgttgcccaggctagtctcgaactcctggtctcaagacatcctcctgccttagcctcccaaagtgctggaattataggcgtcagccaccatgcctagcctacatttacaaatttataacaacatgtttacaatttatcagaaagtagttgtaggcagtccccaattcctaaaaggattgtgttctaaaagttcatggtaatttggaactcagagtgtatttcccaaagaaacagctttgaaatggtggtgaagtcctcagtttagtccgcaggttatattaaccattactgccctgtcttcccctccactcctctccctaccccagcccaagggaggtgaattatctctgactgtgtatgtgtgtgtgtgtgtgcgcgtgcatgcacgtgtgtccctgtgatgcaagctggggctgaggcggtagccagggtggggttaagcacctgggatctcagaggagcaaatctacaaggcctggggccccagggtttgtgggaaggatgagatgactaaggaagaatgaggaaactgggggctgggtgagctgtgtggaagactgaaagtcgtcaggagtgataagggggaagggtagggtagtggctgggaattagtaggcagtgagtttctctacctccttttcttcttattccaatcccttctctctttccctccccgttctcctttgctaactgcatcattcggctaattgagtttctgatgcctggcagagtgagtagaagaaaccagaggaggagactggatgagggtgtaaggagtggcactgagaaaccccagaggagaaaggacgaacagccaaacctgaagatgaaggagactggaagggaagttcccatggctggagaaaccatagctttaggtgttccagataggtcatcatttagtcaccgctccgggttctcagaggcagttttgttggtagtgcaactgtgagccactctggattattctgacattttgggagtatagttatgagacctcttccttgaaatgtttcagatataataaacataaaatagccagcaggcaaaggatctttctatcttattgatattcaggtgatgggtacccatttactactatttttatttaagaagtttgatgttcagagagaagttcctaaaatttgagcctttgagcctttgtctgtaacccttattcaagggctatagacaaatcagcaaaataatagtgtccaaatgttggaatttcctttttgaaattgaggcagatttcttgattctataaagaaaactgtccctggaaacattccaagtttttcctgtgttgtttcaatttgttcttattataaatatttcaaagaaaaagtatgataattgggttttcctaggcaacttagcaaaccctcgatttatttatttcacagatactgaccatatgtcaagcattgtactttcaaaggtgaaaagtgatgcctactcccaaggaacttctgcccattgaggtgacagaaatttataatacatggttttactaattagttgtctttttcttagttgtaccctgaatagggtattaaagaaaacatcacctacatggcaacacttgaaccaagtcttttttaaatgggcgtgattagatctggtgtttaggaggttgttttttaatgttggtgagagcagttttagtggtactgttggagaaggagccagattgcaaactgggactgagaagagaggaagtggaatcagaaatgtggattgttgtcccttgaaactttgcccagaagtgcctgtcatttgacaggtttggatttatcttttggtcttcaagcaccagaattcaacataaattgaacttcaaaattatttcttttaaatgaatcagtataccctcatctctgatgaaagaaagtactaagtttttgtttctccccattttaaatttgagactggtcttgaagagctgctgaatgacactgcaagtcctattatgggattttcattgtaaatcaggaaacctagtctagaagacctctctctttggttacatttaccacctcatggtattgttggatttcaatgtaaggattagagtatacattaacagcctatgaacatttccatgttgtcgtagcacagttaagattatgcacagttagaaggtgggggttgggactgatattcaacagcagccctttcctgtaagttattttcagagacagctcaggaaatgtaaaaaatctgtatgcctctttaactttgtgtttctcgtgttagaattgtagccacacagttctggcaaatctgtttgtttgcatacttaccctgcatttgaaattgcagcagaagcattgggttttctttcttggcaataaagctgttcttttttccttttaataaggaattaggggccaggcatggtggctcatacctgtaatctcagcactttgggaggccgaggcaggaggattgctcgagcccaggagttcgagaccagcctgggcaacatggtgagaccctatctctatgaaaaaaaggagaaacaaattttttttaaaggaattaggaataagtattatgaagagtatcaattaaatattaggaattaaattgcagtattttgtccagctgtgttactttggtctcatttcctgccaaagcagataaatgatattttattttattttattttattttattttattttattttttgggaaatggagtctcactgtgtcgcccaggctggtgtgcagtggtgcaatcttggcttattgcaacctccacctcctgggttgaagagattctcctgcctcagcctcctgagtagctgggattacaggcactgccactatgcccagctaattttttgtacttttaatagagatggggtttcaccatgttggccaggctggtattgaactcctgacctcaagtcagcccacctcggcctcccaaagtgttgggattacaggcatgactcaccgcggccagcccatatgtatgtttttgtgtggtagactgtcactctacacttttagagacatatttttagagatagaagaaaaaaatatagactacaaaaatgtatggaagaagaagatgtgtgtgtgtgtgtgtgtgtgtgtgtgtgtgtgtgtgtgtgtgtattctgtcctgcttagtaaaacatttttttgagatagctgaaatttgcacactttgggagaataaaagattgcattattatttttagagctaactagttttccattgctgtgttttcatcaagttcttgaataataaagatctaaaaatcttaaatttagccaaggatatgattattttgtttttataaaatttgagttaatcagtgagacaaacattgctttgtaaagtgaatttctgacctaggtcctagagaaatgtccccagtgtaagtcttttgggaagggcagaagtggggagggtgacaaggagggcccactatgttctcctaagtatttgcacttcttgtaatgacctgatatataaaggtaatcagacaatcatccttcagtcaaggaatggataaaacctagcagtagggtgtttggaaatcggaatgcatttttgcagtagtcataactgagtgggggttgctttcccagcccgcccacaagaacatatttagcttctaatatatgaaaaatgtgatagaaagtaataggaaatgagactatggcagtaataaaacagcagtgaagttaaataaatggcttttgtgactcttgaatgatggtgccttcaagaagggaaaggttagtgtgttgaggagggaaatagcaagggggaagggaacaggatgaagaggtggagatgaacttttatctccctgatcttccaggtggttcaggggaattccagatctgggcgtgtgtctttatggaagggaatgagtattcatatttcacatattcataagtaatgcctgtgcttgtatattacatttgatagctttttatgttcttctagacattttttaaaaattcattatctattcctggaatcgcatagataaatttggtctttagggaagcccttttggattaaaaaaaaaaaagcagactagacatgtttatatcagcctatttattttaatactttcttgaaactatgttaggtacaaagaacagttcgtgttatagcacatttgggtgtgggtagctacaaagaagtactggcctttttttaatgctgagtgtcttaagttcaggaatggaactgcctactttcttctgggtggtatggaaaaactacttcggtggcttagcctgcttctggtaattgtgttcgtggatctctggagcaaaaactgtatttgtaagtagttttgacagcaggcagagataatctatgattggagcaataaaaataggagtggccaaatagactgtcagtggagtaaatatgatgattgtatttctgggaagaacagctgtcttctttcagttttctttcccaggtttctcagcccttcttgtttgcatttattataggcccccttttggttctatataagcatgaattggagtaaggttgctgtgttacccttttatatgcaaagaaattgagttatggtggttaagtgatttcatgaaaaatgaacagtgatggaaatgcgatggattagtggttctgagccctcatcttcaagggtctgtttaccagactctcccatttatcaaagtattttggtttctgatgcaggaaaggtgaaataataaacactgaacaaagaaaaccagtttccccctgatgtttccataaaaattaaaaggaaaacaaacacatttaggctttttatgtttgaaatggtgtaactgcttgttcttttagctcctgtggattcagtcgaaaacttcatgttttacttagatcatttattttttgaagtcagttttttttgataacatttataacagttgacatactttggcatatgttagtatcgtatgaaacattagaaattaaagagtagatatggtttttaataaacttagaatagcctgttttgttttgttttatatctgaaaagcagttctgattttgaattgttgggcaactgtagttttaagtcgacaaaatgtataaagaaggaataatttgtagcttatccccaccttccctaactttcttttggtcttttgatgtatcccacagtcccaagaagaaagggatttcagtgtagaaatgtagctttttgtaatcccagaactttgagaggcccaggcaggcatattacttgagatcaggagttcgagactagcctggccaatgtggtgaaaccccgtctctactaaaaatacaaaaattagctgggtgttgtggcacgtgcctgtagtcccagctactcaggaggctgaggcaggagaattgcttgaacatgggaaacagaggctgcagtgagctaagattgagccagcctgggcaaaagagcaagactccatctcaaaaaaaaaaaaaaaaaaggtagcttttccactacttaatttttctttccatagctccactaaaaacatgcagataaagcacagtccatctctactgcccttcttactggggaggaaggcagggatagataatgaaatcgtttacaagtccaggtatgatttgcttgataacaaaagtttctgaaatcttagtcttttagaagtctgggggtaagaaaaaaataaataaggatttttttttgttgtgtaatcaagtggtttgaaaaaagtgagaaattaacatatgtctgttaatgattttaggttaaatatagtcttaggatcattaaagtttagaactaaaggaatcattataaatcatgcagtaaagtctcttcactcactgatgcaaccaaagcccgtgaagacttgtcgactttgcccacaccacagaaatgggaaattccaaaaccagagctccagcctggagcttctaatgctggggtggaaagccttatagagaaagtgagcaaaatttagaagacgaaagtgatcttagttgttgcacaaaggttcaggtttacttgcatcattgcacttttttctccttttgtaacagtgttgttaccgctgtgaggaaggaggccccacacacagatgcatatgaacacagaattatatggctgtttttaaaatggtgatttcagcaaggtgaatattcaaaccaggcagaaactttcagcaaacaaataatctgatgctactaatacacgttaacaaaactttcttcccccaaactgactccccatcaatccagtttttactccacctcaccaaaagtctatgaaccagacaagaggaaggattagaagtgccattcacataaatagcatgagttttaggcttaatagtaatcgtggacgggcacagtggctcacgcctgtaaccccagcactttgggaggccaaggctggtggatctcgaggtcagatcgagaacatcctggctaacacggtgaaaccccatctctactaaaaatacaaaaaattagccgggcgtggtggcgggcccctgtagtcctagctactcgggaggctgaggcaggagaagggcgtgaacctgggaggcggagcttccagtgagcagagatagcgccactgcaatccagcctgggtgacagagcgagactcttgtctcaaaaaacagaaaaaaaaatagtaatcgcttggatttactcaagatttccgatatgccagcattatgctaggagctcttgcgtgtaccatttcgtcccttttgtcctttaagatagatattattgttttctttaacagatgaggagactaagacttaatggggttgaataacttgctcaagggcacagagctaacttgtagataaactgaagtatggaaccaagttttctgatcctgagacagactgacatttaatcagaacatgttgatgttgtgctttgctgtgagccatggtttcactattattttattttttattattaatattggtagaggtctgtgaatcttctacccaagggaccacaagggacaaactatttctgtctttaatttgttcactatttagagggaaaacacagagacacctgcagtgataggaatagaaattaatgagcatttgtagagaccccagatttttcatgcaggaagagttcattgattggaaagctcttgtggttaggtaataggtgtttcaaaggttggaaactgaattcattatgtcatatttgcatttagtccggtaggtggtggctgctattcaaagcaagttaaatatgattcctgtcatttactagttgcatgtggacattaatggcatggaaaggattatgcatgtctcatatttccccactgatttacatgagagctgctttttttaaccagtttatccctgtttctcattttgttctctctgtcaagtacattctgacgtctaaagcacttttatttaataatgttatttatgggtccccaaagtaaatattttgtaaggctaaaatactttttgtaataagataatacccttattaacttagggaaaaaatagatttaaatgaatggtaggggtatagtcccccaaaagacgcaggtgatatgttccctctaattagttgaagatttcttagagaaggaagactttatggagccttttggggttctttttgtttgtttgtttttattttttagagacagagtcttgctctgttgcccaggctgtagtgcagtggcgtgatctcacttcagcctccacctcccaggttcaagcgattcttctgcctcagcctcctgagtagctgggattacaggtgcacaccaccacactgggctaatttttgtatttttagtagagacggagttcaccatgttggccaggctggtctcaaactcctgacctcaagtgatccacccacttcggcctcctgaagtgctgggattacaggcatgagccaccgtgcctggcctgagcatattgaattgtgagagagtaggacctggatactggatgagggagcatgttcagtctggctataagttgagagaagttcttaggcaaaccactgctagcattactggaacacaggttatagtcactgaccctgtctcccaaaaggcttgctgaatctacttccaaggtaaaacggattgagatgcctctttgtgactttttaatttgtcatctggctggctctggtggcttatgcctgtaatcccagcactttgggaggccaaagcaggaggatcacttgaggcaggagtttgagaccagcctgggcaatatagtgagaccttgtctctacaaaaaatttaaaaattagccaggcatggtggcatgtacctatagtcccagctacttgggaggctgaggtgggaagatcacctgagtctgggaggcagaagttgcagtgagctgagattgcaccactgcactccagcctggatgacagagcaagaccctgtttcaaaaaaaaaaaaagaaaaaaattggcatgtttattaatactgtctatgctgaactgaacttggtttgtcttgttttaagtgaataaatgccatagtcatagtatagaaagcatatttaaattccttctgaccaggtgcagtggctcacgcctgtaatcccagcactttgggaggctaaggtgggtggatcacgaggtcaggagtttgagaccagcctggccaacatagtgaaaccccgtctctactaaaaagacaaaaaattagctgggcgtggcctccagcactttgggaggccatggtaggagaatcactggagtccaggagttcaagaccagcctgggcaacgtagcaagaccttgtttctaaataaataaataataacttccttctatgcacaacctgctgttactgtgctaattatgtaacaggcttctgtagagccaaactgatttgaaaaactgtacttggctgttaaaggtatatttaaaaatacgaaattactcaaaatgtttttttgttttgttttgttttgttttgtagacagagtctagctctgtcacccaggctggagtgcagcagcgtgatctcaagctcgctgcaacctccgcctcccggtttcaagcgattatcctgcttcagcctcccaagtagctgattagagacgtgcgccaccacacctgcctaatttttatatatttagtagaaacggggtttggccatgtttggccacactgatctttagattcccccggttttacttgtactcacatgtgtatttaattctatataattttattagatgtgtaggtttgcatctccatcttcaccattccatcaccaccaagacccctcttgtccttttatacccacacccacccccctcccacctcttcccgtcaacccctggcaaccactagtctatttcagattgttttgttgtttaaaaatgttatataaggccaggcgtgagccaccatgcccggccctttcaaactgtattttatttaaaatatcctataattctgactttttaatgaatttgtaattttttttcctctcaaattaaattaaaatctacccacaaatagcgacacagttggcctggttgccaggacatttcgttatcaaagggcatataagtataggctttcagtttttagtctacaggtgtaggtacgtgtccatttcactgcctttcatcgcttgtttcctgcctttccctgttttatgctaaaaacaaaacagaggatggccaagggacagtggtgtgatgctgctctgaaggcttttgttatagaacctggtgaagtcctgtggcctcaatctgccagtattctttggcagagattcctacctgatgacagttgatttcagagatctctgattcttatgtaaacatagtgacattttacctgctggaggggatgttgtcaggtgattttagtccgttgtagctaatcaggtgcttcagagagatttggattgttagattttatttcatagaatttatatggcattttaaatataaaatttatagcaaaataatagattttacttttatagaagtcagtaaacttcatgtcccctcaggaaaaccaggaaacaaataaattacctccgattatgtccttatctgaggctgctctcggcatttggaagtggaagtgaaaaaacagcatagaaattaaggatagttcttacccaggaggaatttgcaatgtggtttattactgtttttaattgaaatgtttatcgatataactgtagattcacatgtggcaaagaaacaatagagagagaaactagtctgcttcagctagtttcccttaatggtaacattttatagaactatagtaaagaatcacaactagtatattaacattgacagaatccacactgatctttagattccccccgtttttacttgtactcacatgtgtatttaattctatataattttattagatgtgtaggtttgcatctccatcttcaccattccatcaccaccaagacccctcttgtccttttatacccacacccacccccctcccacctcttcccgtcaacccctggcaaccactagtctatttcagattgttttgttgtttaaaaatgttatataaggccaggcgtggtggctcacgcctgtaatcccagcactttgggaagctgaggtgggcagatcacctgaggttgggagttcgagaccagcctgaccaacatgtagaaaccccgactctactgaaaatacaaaattagccaggcatagtggttcatgcctgtaatctgagctattcaggaggctggggcaggagaatcgcttgaacctgggaggtggaggttgtggtgagctgaggtcatgccactgcactccagcctgggcaacaagagtgaaactccgtctcaaaaaaaagttatataaaatggaatcacagccaggcacagtggctcatgcctataaccccagcactttgggaggccaaggaaggaacatcatttgagcccaggagttcaaaaccaacctgggcaacttggcgagactccatctctacaaaaaatttaaaaacgtgatggtacatgcccgtagtcctagctacttgggagtctgaggcaggaagatcactggagcccaggaggtcaaggctccagtgagctgtaatcacgccactgcattctagcgtgggtgacagagtgagaccctgtctccaaaaaaataaaaataaaatataaaataataaagtagaaaataaaatgtaacaaaataataaaaatatagaatcatatagcatgtggccttttggaattggcattttaaaaaaattcagcatgggccaggcatggtggctcatgcctataatcccaacactttgggaggccgaggcaggcggatcacctggggtcaggagtttgagaccagcctggccaacatggtgaaaccctgtctctactgaaaatatgaaaattagctgggtgtggtggtgcatgcttgtagtcccagctacttgggaggctgaggcaagagaatcgcttgaacccaggaggcagaagttgcagtgagccaagatcacgccactacactccagcctgggcaacagagtgagacaccgtctcaaaaaaaaaaaaaaaacaagaattaaccaggtgtggtggtgggcatctgtaattccagctactcaggaggctgaggcaggagaattgcttgaacccaggaggcagaggttgcagtgagctgagatcatgctgttgcactccagcctgggtgatgaaagcgaaattccgcctcaaaaaaaaaaaaaaattcagcatgattttctgtagagccatccaagttgttgcgtatgccaatagctttttcttttttaatgctaagtattgctaaatattagtagtatttcacttaaaggacatctgggccatttccactgtttggcttttacaaataaatctgtcatgaacattcatattcaggtttttgtgtgaatatattttcatttctctggaataaatgcccaaaagtgcaattaggggttgtgtgggaattgcatgtttagttttataagaagctgccaaactgttttccagagtaggtataccattttgctttcctaccagcgatgtatgagtgacccagtgtctgcacacctcaccagcacttggtagttggtagttgtcactgttttttattttagcaatgctgacaggtgtgcagtaatatcacattatggcagtctgccttcccagtctgatcatcttattgcccatctacacaaaattgaccacattctacattccaaaacatgctcttctctcatggctttgttccactacctaaaaaacccttttcccagacagagaatttttcatctttctagacctaattcacatgctaccttttgtggaaatcctccccttccaatgtaggaaaggtaacaaaatacactcccctcccaatcttccccattgttctccatccactcatctcgttcttcctttctaacactgcctcttcttgtcagtatattatctacttgtttgcttatgtgtctctcctactagaaaacagcctgcatggatgggggatcctaaattttgttacactgccttgtcctcagtgcccagaacagtgcctgacacataggtgcttagtaaatatttattgaaagaatgaatgaggaagtgaatttttgtacattgtgcctccactcccttctctagcatattgcctggcatatcctgtttatggtataataaaaatagctaacatttactatattgattttaactacatatcaaacagtacaatggacccctttccttggtcttctactgttgcacagcaccaactcatcattctatcataacattttgttaacctccctctgcttcccccctaaaaaatacatgtacattctgctctttgtattcatcagttgcacacccatggattcactaagctgcttattgaaaaaattttgggggaaaatggatggttgcatctgtattgaacatgtacagacttttagacttttagttcttgtcattattccctaaataatataacaactatttgtgtagcatttatattagttggttataattagtctaacagtgatttaaagtatacaggaggagccgcgagtggtggctcatgcctgtaatcctagcattttgggaggtggatcacctgaggtcaggagttcgagaccagcctggccaatatggtgaaaccccatctgtactaaaaatacaaaaaaattagccaggcgtggtggcgggtgcctataatcccagctacttgggaggctgaggcaggagaattgcttgaacctggaggtggggttgcagtgagctgagaccgtgctattgcactccagcctgggcaacaagaacgaaactgtctcaaaataataataaataaagtatacaggaggatatatgtagtttatatgcaagtaccataccattttatataagggacttgagcatccatggagtttggtctctgtggggggtcctgaaaccaatcccccacagatacccagggacaactatgtaagaataaatattgtgagagattacaacacctttgtatccttggccccagcagatacctggcacaaattaagtagtcacatctgagcaaacagtggtcaggttaaacactgcttttgcttgtgtgaagtcagaatccagctgcattttgagtaaaccagtgtcccactgaccaggcttccagaatgtacaggaaacatctgttaattttggaaagcaattacactggtgtggagaattactgctatttgctaaaacaaagctcccttggagaagagaaattgaattaaaagacctcacatgcatctgtctttattagatacatggtgagcatccttccgtattgtgggatggttatgcaagaagcactccattccaccagtcctctcaccaaacctgcagaaagaaagcatggagtctaaattcccatgccaatcaaaagcagttttgacagtttcttggttagtacaggtcttaccatatctaaatgtgctactcagaaaatgcaaagaagatgtatcacttaaaaaaatctagtttgatggaactgtaaatgaaagaactgtccctgtagtcttacatgtagtaagactgaaactgaaaaaatctaggcagtctgtaggtagctttggagttagcaaaaatttactaaaatgttctggtgaagggtctagtgacattttaatgtattttttaatttttaacttttttttaaaatatagagacagaattttactatgttgcccaggctggtctcaaactcctggcctcaagcaatcctcctgctttggcctcgcaaagtgctggggttacaggtgtgagccaccatgcctcgcccaaaatttttacatatgtggggaaatatcagaatgatttggctatggaaggcatgttttctcttacaggatgaataatccatatagttcaggatttcaacatatattttttggccaaaatatagtattttagactctgctgtcttgtctccatgtaacatatgggtacggcctaaataaaatacagttttttccgagccctggaatggactaattagatatcgatatggaaaagatttaagagtattacctaagagctataaaatcttttagaaaaatattaatttaagaaaacatcttggccaggtgcagtggctcacacctataatcccagcactttgggaggccgaggcaggcagatcacctgaggtcaggagttcgaaaccagcctagccaacatgacgaaatcctgtccctactaaaaatataaaaagtagccgggcgcagtggtggccgcctgtaatctcagctactcgggaggctgaagcaggataatcacttgaaccctggaggcggaggttgcagtgagccgagattgtgccattgcactccagcctgagcgacagagcaagactccatttcaaaaacaaaagaaaacatcttatctttttattcctactgtacaacagataaaatcccatgtcttagctgttagaaggcaggtaaaatgcttaaaggatttgtaaagacaaactgaaaactatttaatatagtacatcttttctcaatgtattaaatactctttctagttaacaggtacttactgcacattcactgtgtgtggagcaccatatttgaatataaaaggaacttttacaatgaaagttagtactaacaagcgaagaatattaaagatctgaaaggtgaaagttttctattactattaaggaaatccattttgtctttttaaaatactctgtgaaatctttctgtagggcaaaacttaaatactgtgaaaataagcaaatatattagctctagctaggttaggaggtttttttgatggtaaaattagtttaagtatgtttttatacccagtggttacttgattaactgttgatgcttctccttttcttgaatatgaccttactagattctttttttttttttttttttcctatgaaacagggtctcgctctgtcaacccaggttggagtgcagtggcaagatcacagctcactgcagcctcaacctcccagacttaggtgatcctcccacttcatcttcccaagtagctgggactacaggcccacggcaccacacccagctaatttttgtatttgtttgcagagatggggcttcaccatgttgccaaggctggtctcgaactctgggctcaagcgatcctccctcatcggcttcccaaagtgctgggattacagacgtgagccactgcacccagctagattgactcttgatagcagtgattctaagcagctttaattcttattgagccctcacagtgttaagaagcaaaaacattttttgtgtgctcttttgtactctacaaattaatgtcttctctgcctggtctttgaaatcttggccccagtaaatatctgtgctggctatgcagctaataccctgtggatgggttctgttaagtaaaatctgtgactgtgaacacgggtgtgggggtgtatagaagcttccattttgctatacataatttcctgatgcccagggtgaaaatattctttgttcactgggtttaccttacaaagtacagggaatttattattttcagagcggggagtggtctagggaattagagaattcattttgagattatctacatgaagtagaccaaaaactattgctgtaatccacatgtcaacatgtccagatttttttcttttctttctttgcattttgtgggaagagcagatggggatagctttctctaattcatcctctctgcctgctttacctttgacctttccttaccaagtattaaaaaaaaaaaaagttgtttttaaggaatacttgaaataactgagattagtaaacttggagaagagagaatggggattttcagttctttacgtatttgtttagttataaaagttatataaaattgttgtcttaaaaaaagttaaatgtacatgaagtgaaaagtaaaatcctccctccttttcttctctttatccacctccgttccactggagagataaggttttgggggttttgtttgttttgatttttcacatggaaagttttagaataagtggaaagtttaggagtaaactctgtccctatgaggttattgttatctttgaggtacatgagaaagacaaaggctgacagctccattttccccagggcaggaaccttgtcttccttctcctgtgtctgtggtaacatgtcctctacacacacacacacacggatggtgctttgcccatctgcttatttctctcctttaccttgccttacttactgttttctggtttcttcatttcttctgcttccctcttctccccattttttttctgtgccttcagctagtagctcagagcaagtgatcactgttttgaaattgcattctactgggctttttctagttcagtgcaatatgaaaatttccatttagaaaagaaataggactctttgctttatattgcaaaatgaagtttacattactagagaaatcagcaactttattgcatacgtgaggtatgcttatcagtgtcattcatcggccaccttggcctttgtcgcatcaatgtgatcattattaagcaaagagggacaaagccagcttttcaaaacatacttgaaaaggtactttgagatctagtggaatacctgtgaattcgtcattatatgtgactaaaattgttttagaaataagaaagaatattgagatatgcatgaaactgtagttattctgagcttcaggatattactgtacaagtagtaagctaccaaaaataagtagtgaaattaaacatggaaaatgagctctaggagtaacctgctgcaaaaccgtggctcacatgacctcactgtaggagttcttgactcagacctttaagctggtgatgagctgtttcacatgattgataatgcagaagctcctctctgaagtcacttttttttttttgttttttttttggggacgcagcctcgctcagtcacccaggctggagtgagtggcgcaatcttggctcactggaacctccgcctcccaggttcaagtgattctcctgcctcagcctcccaagtagctgggattacagatgcatgccaccatgcctggctaatctttgtatttttagtagagacggggtttcaccatattggccatgctggtctcgatctgctgacctcatgatctgcccacctcatgatctgcccgcctcggcctcccaaagtgttgggattacaggcatgagccaccacgcccagcctgaagtaacttgttttttttttttttgaaatggagtcttgcactgtctcccaggctggagtgcagtggcacgatctcggctcactgcaagctccgcctcctgggttcatgccattctcctgcctcagccttccgagtagttgggactacaggcgcctgccaccacgaccagctaattttttatatttttagtagagatggggtttcaccgtattagccaggatggtctcgatctcctaacctcatgatctgcccgcctcggcatcccaaagttctgggattacaggcatgagccactatgcccggcctgaagtcactttttatacagttctagacttttaagtatatacaagagaaacagtgagtgagcaaacgagctttctgtgtaccaggcattgttagtgcattgcttgtattaatttgtttaatccccacaaaattctgtcaggtaggcaatattatgatcctcattttatggaggaaaaactgaggcacggagaggttaaaaactgactcaatttcacctacttagtatgtggcagaactcggattcgaacacaggcagttttgccccaaaggaaatatactgcttcttttgggtaatctgctgtaccaaggatcagcaaacgttttccgtaaagggccagatgataaatattttagactttgcaggccataggtctctgttgcatctcttcagctctgccaatgtagtgcaaaagcagtgacagatagtacagaaacaaatgagcatggatgttttccaataaaacttcattatggacatgaaaatcattttcatgtgtcacaaaatattgttctttttttttttttttcatgatttaagaatataagagccaggctgggcacagtggctcatgcctataatcccagcactttgggaggctgaggcaggaggatcacttaaggtcaggagttcaagatcagactggccaagatagcaaaaccccatctctactgcttggaaggctgaggcaggagaattgcttgaacccaggaggcagaggttgcagtaagccgagattgtgccactacactccagcctgggtgacccagcaagactccgtctcaaaaaaaaaaaaaaaaaaaaaaaaaaaaaaaaaaaaaagaagaagaatataagaagcattcttagctcatagaccttacaaaaacaggcagcaggttagatttgcctaatcatactatactatgtatgtgtgagatattaggatggaatccattcatttgttaatacattcatgcaagaaaggtattatactacattttgggatttctagggggaacaagaacaactttcagttcctcttgccattctgcttactggatgaactatgatgttgtcccctttctcatgcctgctttttaaaaagctgtctttatttcctgtccattgcatataacagatatattcacattatctcatttaatcttcattgcaggtggtatgttatctcaatttttatttttatttttgagatggagtcttgcgctgttgcccaggctggagtgcaatggtgcaatctcagctaactgcaacctctgcctcccaggttcaagcaattcttctgcctcagcctcctgagtagccgggattacaggtgcgcaccaccatgcctggctaatttttgtatttttagaagagacgaggtttcgccatgttgaccaggctggtctcgaactcctgacctcatgatcctcctgcctcagcctcccaaaatgctgggattacaggcgtaagccactgcgcccggcctattatctcaattttatagtatagggaaatgtaaacttagtccaattaactagccagttacacacagccatgagtggtggaccctgccttcaaatgcaggtctcttaggctgaaagagcattttttttttcttctctgctgcctttccttccctcgtagaaatgtatgaaactgtgataaatgtttgtgatcctgtcagaagcgaatgtttattttacttgaatacacgtttattttcacttcccttccattttccctgactctcgctttcgaagatgtaatctgagtttgatagaaaagtagtgattttttttggtttcccaatcaaagaagctaaaaataaacacagaactagtcagcaatgtaactggtgtaaggactcactgatgcgtgggattaagagtggaagaagggcccgggtgctcacacctataatcccagcactttgggaggccgaggcaggcagatcacttgaggtcaggagttcaagaccagcctggccaacatggtgaaaccctgtctctactaaaaatacaaaaattagctgggcatggtggctggcgcctgtcatcccagctccttgtgaggctgaggcaagtgaattgcttgaacctgggaggcggaggttgcagtaagccaagatcgcaccactgcactccagtctggatgacagagtgagactccgtctcaaaaaaaaaggctgagtgtggtggctcctgcctgtaatcccagcactttgggaggccaaggcgggcaaatcacttgaggtcaggagtttgagaccagcttggccaacatggcgaaaccccatctccactaaaaatataaaaaattagttgggcttggtggtggacacctgtaatcccagctactcaggaggctgaggcgcgagaatcgcttgaacctgggaggcggaggttgcagtgagccaagatcgcgcaccactgcactacagcctgggcgacagagcaagactccatctcaaaaaaaaaaaaaaaacgtgcaggaagaaatccatgtcttttcctgacaccctctacagcttccccagggtgctgtctcagaaagatgtgggttccttatggttttggggggttattgatggtttataactggtctagagtagaccttgaagacatatcatttgtgtgaatagaatctgaagaagaaagatggcaaataggcttacttgtatatagttttaaataaggaagtagacagatttattcttgagcaatgactaacctccccctctgtggctcctcatgggctcccaagaagcctttgatccttttcccccatgttagtgggaaatcccagatatgattgtagttcctattggaaactgatacacttaaataggtttagataaaataacatctgggaatgattgcagaagtcctttggttttggctattggtttccttgtaattcccctaccctttcattatagtggggtctgtatataatgtaacatttagcattctgtaacatggaatatgccacatttctggaacatgtaagttaatgcctttaacttgaaaattgcttgagtgtatcatggcagagtctagatgtatatgcaaaatatacttaggtaaacacaaagctgactttgtacacctctcaatgtaatttctcaggataatcttattaaaatctgccagtgcacctgctttgtacctcgcgatcccagacaatggcaccttttttggaggttgttttgttgttgtttttgttgtttgagacaggttcttgctctgtcacccagcctgagtgcagtggcacaatcactgctctctgcagcttcaaacttgtgggttcaagccatcctcccatctcatcctcccaggtagctgggaccacaggtgttcacccccatacttggctaattttttatgttttgtagagatgggatctccatgtgttgcctaggctgatctcaaactcctgggttcaaatgatcctcctgccttggcctcctaaattgctgggaaccaccgctcctggccttggaggttgtttgaattacctcctcttcaccccgttagtgagggagggatttctgcttagggttacgggaatggctgaatcctgatgctcgacactggacgggtgagatcaacagcagtttctcattcacatgtagtcccagcctagaggagggcacagcatgccacacctggccacccaggcctgtactcaggaacaactaggggttgcgggaggcaggctgtatacaagagggtgggggtcactcctggttcccatgagaggatgtgattggcttgtttaaatgactctctgctgactggcagggaactaaaacccacttctcagggctaggcagacactgcacctggtccttgtgactaagagggtggccaggggactttatcagcagaagcatagtgggaagggcagtgtgtagtgagaccatttggagcccttctgattttccccagatgtcaaggcagagcataatattgggccttaattttcagccttgcaccgcaatggttttgtgctgactcacaatcaagagcatagcgtggccaggcggagtagtcatattttccaaaaggctcgccaccttttcagtggctgttaggattatgatgacaagaccttagaggaagcaaaggggtgtgtacagctgacaccaggacaaagtggtcaccctgttagagaaggtagtcaaaggatgagctgttttttctactaacttactaaccagtcttgcccctctcgagtagttgggattacaggcgtgagccactgtgcccagccaagttgtctctttttagaaagtggttctttcctttgtcttaaattactgtggttatctcaatcccttctgccttcatctgtttaagaaggtctcagtaggaaaataaagagaagcagtcaatagaatttgtagtttgaacattgtaactaattcaatattatcttcatctgcctcctaaaatagtaaatgaaacatagtaggccctcgataaatgtttactgaaataaatggcatcaccatttttatatattctaagtattacaaaagtatttttaaaaatgtatgtataggctgggcaaggtggctcacacctgtaatcccagcactttgggaggccaaggcaggtggatcacctgaggtcaggagtccgacaccagcctggccagcatagtgaaacccagtctctactaaaaatacaaaaattagccgggcgtggtggggcacctgtagtcccagctactctggagcctgaggcaggaaaatcacttgaacctgggtggcagaggttgcagtgagccaagatcatgccactacactccagcttccatctccaaaaaaaaaaaaaaaaagtatgtatacatatatatgtgtaaatatgtgtatgcaactgtgaagtattctcttgtagccatcccaacctcattatttatttctaatggcctttattttttctggcatcaagtaggaacagacagtatattacataatgaggatgtgaaggggagaaatgatactaagtcaactctaactttgtcttaaaactttttcgttttcaataagagaaacatcatctttggtgcaatgatggaattggattgggaacttgcctttgttttttttttttttttgagagaatctcgctgtgtctctcaggctggagtgcagtggcgtgatctcagctcactgcaagctctgcctcgccattctcctgcctcagcctcctgagtagctgggactacaggcgcccgccaccacgcccagctaatttttttgtatttttagtagagatggagtttcactgcattagccaggatggtcttgatctcctgaccttgtgatctgcctgcctcagcctcccaaagtgttgggattacaggcgtgagccactgtgcccaactggaacttgccatattttattggaggcaacctcaagctcagaatgcttttctatttgtattaacaagaaagttgtccacatttcgtgatgtgaatcccaattctaagaaagcaaaattgatggtaattaaatgttgcagatttattttatgtagtgcttgtttcaggagacatttttgtaacaatttattcctttctagctagacctggattccttctagctaagtttgacctggatgcctcccagctaagctagatggccaagagtgtctgttggactcttgtcaccatggggctcctcctgtgtcattaagataggaccaggaaccctgaagcacatgatcatctttacttgcaggtcaggaagctctcccacaaccaaatggagaactatgggagacggaccctattattatgttgctgttcactgtgacgtagtcaacaagttgtgtggttactctgtgggccctgcaggctgttgaacatccctctactgacttctttttttcttttttaaagctatcaactggctagccagatctccccttcctacctattatttagagacttagacttaaggttctcccaaacaaacccctctcggcagtaagggaaagccgtaatttatatatcttaacaacttaagcaatagttaaaagagattttttcttttttttttgaaacggcaatcctgaaaatgtttacacagacctccaagtctgggggttgggggagaaagggaaagaacaggagaaaatatctttaatctcatcatcctgggaagaaaataaactatccctaaagagtttatatacatataaaaatatgtgtatatatgtataaatacatatatgctttgaaccaccttttatgaagcttttcagactctgtgtgtgtcgggggggtggtcaactttgaaaaagtaaaaatgcacgtgataacaacttttaaaaatgtactgaagggcaaataataaaatctctcagccaggagtggtggctcacacctagcactttgggaggctgaggcaggcagatcacttgagcctaggagtttgagcccatccttggcaacatggcaaaacccagtctctacaaaagaaaaaatacgaaaattagccaggtgtggtggcacgcacctgttgtcccaagtgcctgggagcctgaggctggaggatcactgagtctgggagacagaagttacggtgagctgtgatcacaccactgcactctaacctgggtgtgcactccagcctgggtgacagagcaagcccctgtctcaaaaaaaaaaaaaaaaaaaaatctgtcttttattctcaggactttagtcccagaggcaactgtacttcaactatatttatcagtttttctgaatgtgttcggggacagcctggtatatgtcagcatgtttgtgcacacacacacacacaaatatacacactttttacatggttttgtgtatatgtactcttctttttgcttctctacacaaataggagcacactctgtgccttgatttctttttaacctaacaatatttcctggagaatgatctatgccactgtgcatagatctacctccttttttttttttttggaggcagagtttcgctcttattgcccaggctggagtgcaatggcaggatctcagctgaccgcaaccttggcctcccaggttcaagcagttctcctgcctcagcctcccgtgtagctgggattacaggtatgtgccaccacgcctggctaattttgtatttttagtagagatggggtttctccatgttggtcaggctggtctcaaatttcctacctaaggtgatccacctgccttagcctgttaaataactgtttagtaattactaaacaaattaaataactgtttagtaattcattatatgaatgtataaccccaatttatttaaccggtctttttttaatggctattgaaggaagatccctttaagactgcttctttatgttaaatcttaatgaatgactttaaagccaattacatataaaagttgcaagcatatgggtaggtactcttctattttaaagaattttgcattctatttgttttttaaacaattttcagagttgtcttgtgaggactgtattttaaatagcagcctcaaggtactgattatgattttggtcttatttatttatttatgagacaaggtcttggtccctcacctgctggagtgcaaggtcataattgtggctcaaggcagcctcgacctcttgggctcaagtgatcctcccacctcagcctcccaagtagctaggtagctaggaccacaggcacataccaccatgcaattttttttttttttcatagaaatggggtctctccctgtgttgcccaggccggtctcgaactcctaggcccaagcaatcacccccaccccccacagcctcccagagtgctgggattacagacatcagtcaccaccccggctctgattatgtctttagtcagtagcatacaattctaagaatcctcgtaattacttgggggaaggtgatagtaatggtattcgcaaaggtggaggttgcttctggaaaatgaagcaagcctgtttttaaaaaatatccatcatttgaagcctggcattttaccctaacagagtcacccagagacagttttaaacagtttctggtttatatttcagggaagctggatatttttgtgtgatttctttttttttgaagccatagaaccctagcttgctagtttgaaaggctcagttgttaaaacctctaaaacttaagaatgaaaaaataaaacactgatcgtgtacattttatgttgtaagtttctttgtttattcattttttctatctttaagtaacaaaattctgtggtactgtccctttaagtattttagtgattttatttatttttattttgtgaatactaaagaatttaactcaaaaagtttatacactacatatatacattataggattttaaaaactgaaattgagataataaaatcattaatttttaaattaaaatttgtcttaacctttaatcaagcaacctctcgaagagaagattaaaaatcaatatatttgatacctttataatgcaaggacataaaaaaattgatagatgtccttttctttcagggggaaggatttctgctattatacttattcaataagaacatcagcatccatagccttacgtattactgaagcattgatgtttcttttttgtgaaagcagttaggagtggagaaagacctactagttgatctggtttacctagtttacctactttacctaccagcactcaggagtcacactggttgaacttgatatttgttcagtcctgtcacctggctctgcacatacttaaaataattgtgcaccatcttgtgtttgaaaaacctaaaaacatgatgtgcatacgtgacggttgctttttggaggatgcaaatggccaactatgcctatttcacaagtcgtgccatgtttccaaactcattttggtggtagacctcaagaacattacttgagtaagggatggagaaaattctagaattgctgtgtaattgagaagacctgaaaaggagagtaagaaggattttttaaatagttttttttaggcacggtggctcatgctgtcatcccagcactttgggaggccaaggcaggaggttcatttgaggccaggagttcaagagcagcctgggcaatgtagggagagaccctgtctgtaccaataaataaataaataaataaataaataaataaattgttgtttaaaattgatttgattcatggttttactgtgacagtggaatctgcagtcctataagggaactgaagtaacagaaggaaatgtttcctggtaaaacaaaatagaaataattttttggtgaaaattgtataccaattttatagttagtgtgctataataactactaaataacttgaaatttattttgctaatttaaagcccataatggtagtttttttcccctcattctgtgataaatatgaaatgtgccaaaggaaacacataatcaccaagtcataatgagacagcatttgaaaaaaaattatcacaacatcctgaggacaagcaggtttctgttcagtttgggccaggagtagaaagaagaggaagagaaagaccacagaagttgagatttacatgtggtgacttggaaataagaaagaaacttctgaaggtgagggaattggaaagaacttctttcttcaagcttgggaggaattacatgaaacattccttggtaaaggggctcagaataaaaccacaggcaaaagaagaaaaagatagctggaatttgtcaacaacagagaagccattcttaactcagcttttcctttccttctctcggccatccgatcccttatcccttctccttgctggaatttttaatttagtaggggctcagaaggatgttttttggtgaacctggcagttgctatgctggcttatcattgtacaggttttctgttcctaaaaactcttagaggaaatggatttagtatttttaaaaaagataattccactgggcatggtggctcatgcctgtaatcccagcattttgggaggctgaggcaggcagatcacctgaggccaggagttcaagaccagcctggccaacatggtgaaaccccgtctctactaaaaatacaaaaattagctgggcatggtggcgtacacctatagtctcagctactcaggaggctgagatgggagaatcgcttgaactagggaggcgaggttgcagtgagctgagatcacaccactgcactccagcctgggtgacagagtgagactccatctcaaaaaataataataaaataaattaaaattttaaaagataattccttctaaaagagaaggacttcactttagttgtgacttattacctgaaagaaaaatttgatatacttccagtggaggtgtgctgtaaatatatagaaactagcatatagaaaaaaataacttttaaaaagtgatggcatcatgtagtcttcacttcagatgtgtagatgttagcatgtggaattgaaggaaacagttacccatcagtaggaatttaagtctggctttacttgtttgtcttaattccagtgcactggaaacaaactgattttctagaaactgtggcttcttgcagaagcaaatctgacttagggtgcttggggaagtagagcccactctttgttctggttgctgttggagcttactttccttttacttcagatatcaaattatgaactaactaggcagaaagacgtggaggaagccctatgtcctgttcctttaccccacaaagcagacagtcttaggatgttatcattcggacagtgggaaggaaataaacagaactccaaactatacaattggcattagtaaggagtccttgtttcattatcagaaatctaaaattggctgcatatggtggctcatgcctgtaatcccagcactttggcaagactgaggtgggaggattgcttgagcctgggagtttgagatcagcctgggcaacacagcaagacccttgtctattttttcaaaaaaataaaaatagaaatctaaaattatctaggtagattcagaagctgacaacagttgtttgggaaaatagagtaattgttttagaaatgaacatgtaaaatgtggatcctagattttgctgctaaaccattatctttcctttaaaatctgctcccttgttttaacatttgtttcagttcatgtcaccctcattctgcttgtgacttggacttgacaccttgatgtcttccataagtttttcctcctcacccctttaccctaagtcctggtgatttttctttttttttttcttttttttttttttttttttgagacagagtctcactctgttacccaggctggagtgcagtgacatagtcttggctcactgcaacctccacctccctggttcaagcgattctcctacctcagcctcctgagtactgcaacctctgcctcttgagttccagtgattcttctgcctcagtctctctagtagctgggattacaggcacatgccactgcacccggctaaattttgtatttttagtagagacaggtttagctctgttggccaggcttgtctcaaactcctgggctcaagccatccacccactttggcctcccaaagtgctgggattacaggtgtgagccaccatacccggccctgatttttcttcctcttacatccatccctttctctcaattcctgatgtagccaccctggttcaggccacctgcaccattaaaattcaacacctgttgctttctgatatcattttcatttatttggtgaaaaattcttgagggtctcttgtgtgttgggctgtatggtgaggattcagctggaaaacacaatttcaatttccttgtctttggaaatttacattttaatgagggaaacaagtctaccaccaagtgcagtttagtgagatagttaaaggattcagaagagacaccaaaatctctccttgtttcatggcattgtgttttgattcatgtagttttaatatttaaagcttttttcttgttttcagatgttcactttgtactttaatccctcttgtatccctaatggatgtggcaacacctagttactatattcttaataatagccttccaaatgatgtttgaccaagaaacacctttcacccctctcttcagacaaaataaacctaatttcttttttttttttttttttttggagatggagtctcactctgtcgcccaggctggagtgcagtggtgcagcctcggctcactgcaagctccgcctcccgggttcacgccattctctgcctcagcctcccgagtagctgggactacaggcgccctccaccatgcctggctaatattttgtatttttagtagagacggggtttcaccgtgttagccaggatggtctcgatctcctgacctcgtgatccacccgcctcagcttcccaaagtgctgggattacaggcgtgagccaccgcgcctggccaaataaacctaatttcttcataggtgccacagccctattactaactatctgaatctattatacttaggagtctaaaacagtacccagatgggctggatcaaaaagccttttagagcagagcttctcacacatagactgggattttgttacagcacggatcctgattcggtgggttgtgggtggcctgagcgtgtgttttctgaggagcttccaggtgatgctgctgccgattggaaattgaacatgtgttgtgttaacagggttttagaagatataaagagataaggaattacgataaaaacaagtggtggggtaccttttcttctagctatatggttggatcctatagtctgtccaccctgttaactctcatttgctctcgctaatctcagtcaacaattaactatccggcggggttggctcttatccctgcacccagagacagtgaatcctgccagtgatctaaccagaaagttgctatcctctatccaccacttacccccggggagtgagtctcctgcatgtcttggggagctgtgataaagtatgcacccaccttacgaggctatgatatgactcccagaggccccagccattgagtaatggaaaaccccgtctttagcagtgagaggtgttccttttggcactgtgcctccagccagctggtttgtgtaacagttgggctccaggaatggcttctgaggcaagtctgtatcctaccatgtgtaatcaggaactggcagaaaatttatctttagcttttaagattcccattagagattctcgtaacttgtaaccttggctgttgagtgacctgcctgtgacctgctgaaagagcctgccagagtggaatgcaactgtctccttattctgcttgagtgtttttcctgatgattgtggatcttttactgaccccacctatactcttctattctgcagatattcttgtagacttacgacagaaaagcagttgctacaggcaattggctcctgaatctttccagccaatgctagaaggaattattttcatctcttcttagggaactttcctatggaattccccccacagattggattgcaacagtggcttttagattcatgagatctatattaaaacaaacggaggaaccttgatgatatcaggctggcaaggaggaattggtaaatggcctggctctgtggttttccaagttcagcttgtatcagaatcacctggaaagcattaaacaagcttacttattatttgctaggccctgtgccccaggtagttgtaattgctgggcaaattgctgggccctgggcccctcgtagttctaatgcagcaggtcttgagcataatctgagaatttgtaacatttcctcttcctccccatgtcttgtgaacagaacagtgataaccatagagcagggtacatgttcacagttgcacctgcactgttgattgtcgtcaccattattacccccgagtcctcatagatttgttacttgttttttgttgttgttttaaacaccaaggcccaaggaaacagcaattcttctggtatacctggcagccttttatggtaaaccagctcactttctgtaaagcttcttagtttattctaggagtagagacctgatcttctttgggagggatatatagaagcataggatgggagcagctgggaaacttgcttcccacccaccttcttaacattaaaaattcaaaaaattaatttgagtttttggcagctgagacagggtgaaggaagggaaagttggctgatctgggtcttttcattcttccacatcccttagatatatcttgtttgcattatgaagataagatgttgatttggtttttgttttgctagcacttcttattattgaaggtgactaatacctgctttctgttgaatgcagttcaggagcatcccaggaggaacagaatgatcttggtcttggtgaccttccctctgatgaggaggaaatcatcaacagttctgatgaagatgatgtcagctctgagtcaagtaaaggagagcctgacccactggaagataaacaggtatactttggtacttaattgcttcttgacctctccctatgcttgggaatgatatttgtctgcataataggcacagaaacccttgtgagttttcttaaaacttataaaacactttcaaaatttaaatttaattcctgctataatgtggcacctaaaatattctcatgttaccaagtatgtatcacttagagattacttagtgatttttgagaaattattattttgagacagagtcttgctctgttgcccaggctggagtgcaatggcgccatctcagctcactgcaacctttacctcccgggttcaagccatcctcctgcctcagcatcccaagtgcctggcattacagacacctgccaccacgcctggctaatttttgtgtttttagtagagacggggtttcactatgttggccaggctggcctcaaactcctgacctcaagtgatccacccgcctcagcctcccaaagtgctgggattacaggcgtgagccatggtgccaggcaaagaaattctttttcctaatgtccaatggcttgctttttgataacaacccccccccccttagaattgttccctgtactgctaccaattttttgtagatttttttgaaataaagaaattatatgcattttagactcaaattattttgggaaagaataaagatggctgttaatagtacatcatcatttgctttgaaataatccagtgtgtgtatgagtttggggggagcacagcatacatgaagattgtctatgtgttcagagttgtttaagatgcatgagggctgggcacggtggttcacacctataatcccagcactttgggagaccgaggggggtggatcatgaggtcaggagatcaagaccatcctggctaatgcagtgaaaccccatctctactaaaaatacaaaaaattagccgaccatggtggtgggcacctgtagtcccagccactcaggaggctgaggcgggagaatggcgtgaacccgggaggcggagcttgcagtgagccgagatcacgccactgcactccagcctgggtgacagagtgagactccgtctcaaaaaagatgcatgatgcaggggttcattataatgtctctctagtttggcatgaatatatttatctctttcatttgaaaccacattttttaagagacattattaaagggaaaaagttagtacatcaacaatatccccaggaatgttacagcaatatggaatttgaaaagatccacatagcatagcaagccatggagaaaattcatgtgccataatttcgcctaattcctgtgccataattttatcaatctattgttcttcctgtttaatatttttgccctgtttaaatttatcttcaggcttaaatgaatggcccacgtgcagcagtctgaatttaagtcccagatccaccagctatgatctggtcaactttgggccaattatttaaccttttgggactaaagagtaccattttatagataaaaaaaagaatagtactcatagaattgtgaagattaaataatctgatacatggaaagcattagaatattgatcggcacataatagctcagtgatcatttatttataactagccagacttcatttctatgctgtgaagtattaaatcatggtgttgggaataaccactataaattacttaggctagtgaatttgtaaaacccctaagacagatgagtgactctcttcttaaagacccacagcactcagcaatgtatagattttactttgactatcaagtaattccttttgtgtcttactggtgtctgtcttgctttaatttgaaagctcgttttccatgttgcagcttcatggacatagattctacaaatgtttatagaatttgcactatgttccaggtaccactggtatttactagagataagcagtactcaggttctaagcttctatgtagccaacgttcttttcttttgagaaggagtttcgctcttgttgcccaggctggagtacaatggcgcgatctcggctcactgcaacctctgcctcccgggttcaagtgatcctcctgcctcagcctcctgaggagctggaattacaggcacccatcaccatacccagctaatttttgtatttttagtagagacggggtttcactatgttggccaggctggtctcgaactcctgacctcaggtaatccacacacctcgggcctcccaaagtgctaacactacaggcatgagccaccctgcccggcctagcctatgttctaacaggataagaggaacctactgtgcttaatcataatcaggaagaacttcagagtgttacaagctatgaaggaaacaaatcagagtgatgtgctacaaacccaggaaggtactttgggaaaaagcctcttagaaaatgatatttgcctgggatttaaatgactggaaagaaccaaagcctgtgaagaatttgaggaagaacattcaaattgtcttctttttttttgagacggagtcttgctctgtctcccaggctggagtgcagtggcactatctcggctcactgcaacctccaccttccaggttcaagcgattctcctgcctcagcctcccgagtagctgggattatgggcacccaccaccatacctggctaatttttgtatttttaatagagaaggagtttcaccatgttggccaggctggtcttaaactactgacctcaggtgatccacccgcctcagcctcccaaagtgctgggattacaggtgtgagccaccacgcctggcctcaaattgtcttcttgagggccataattaaatcaatcctgactctctttgaaaagcaactcccaagttttttcttttcctagcagacactcttttctattgttttggtctagttgtttgttttgcgtgaatcttttcccatttctttccatacttcttggagcactgaccaaaattggtttccacattctatcagggatctcactgatacatcgtataaaggaaggattaatctttaacccagcagtgttatgtctgtttccaacacatcctgtgataacaccgcctggttgactcactcattctgtgggcagtggagactcccagggttccttcctctgcgtttgtgcctgcctttcctttcccttcctgtatttatattactgttttatgttattagttgtgctatattgcagtagccctgttaaatttttatcctttttttttttaaaggactatttctttagttaatcatggacattgtttttagtgcaacagagtacatttatttttttcatcatctcaagcatttaccaagcctttatgtgattgtgttacagacattcccattatactcttattttaaaatatacaataaattgttgactgtaataactctgttgtgctatcaaatactagattttgttcattctatctaactgtgtttttgtacccattaaatattcccaataccctccacccctaattatggacattgaacattttttacctgatgccactagtactaataatttccctcctttagaattctcagccacgctaatgaattttctctttctgtctcttcatctgagacaacaatagcactaatagaatagtctctttctttccagacacttgttaatccatctggccacagcctggtgaatgcccttctcttaagtaatttgctttcatagttgttagaacacggtctttggagtcagattgcctgggttcccaccacttactagctctgtgatcttgaacaacttacttaattttactttgccttagtttccccatctgtaaaaagaagaggaaaaaaagtggacacttgactttattttctaagattgttgtgattattaagtgattatacactgtttagaacagagcttaacacaaagtgaatgcttagtagatttttacctattattgattttttttttttttaagatgaagtttcactcttgtctcccaggctggagtgcagtggtgtgatctcggctcactgcaacctctgcttccagggttcaagtgattctcttgcctgagcctcctgagtagctgggattacaggcatgcgccactacacccagctgattttgtatttttagtagagacggagtttctccatgttggtcacgctggtctcaaactcctgacctcaggttatctgcccacattggcctcccaaagtgccgggattacaggcgtgatccaccgcgcctggctgctattaacgatttttatgaaaataagcaagccaaatcttaaacatctcaaatcaagctttctgtaatcttaccaataaatatattgtttctggcttggcttttcttatctttgatgagtaaatatgaaacttatttacatgtaaggtagtattttgtttaatgggaaaacttgaaatttggcatcctaagacctgggttttagtcttagatttgtcacttactaactgtatgaccttggtcgagtaattttttaaagtcagtttatttacacgagtatcacttcacaattgacttcaggtgacttaaaaaaaatgtgtgtaatacaaaaagtcaaaatgttttttttaaagaaatcaggttgtcaacatataaatggtgctggaatcactggatatccacctgcaaaaggatgacattggacccccttcctttcaacatacacaaaaactaactcaaaatggattatagacctaaatgtaacaactcaggcccagtgcggtggtttggctgggcgcgggggctcacacctgtaatcccagcactttgggaggtcgaggcgggcagatcacttgaggtcaggagttcgataccagtctggccaacatggtgaaatcccatctctactaaaaatacaaaaattagccctgtgtgttggtgcatgcctgtaatcctagctactcaggaggctgaggcaggagaattgcttgaacccgggttgcggaggttgcagtgagccgagatcacaccattgcagtccaacctgggtgacagagctagactccatctcaaaaaaaaaaaaaaacctcaaacagtaaaaagatcaatcacccaggcttaagaatctgaatagactaaagaagatatacagtggccaataaagatgtaaaaaggtgttcaacatcataagccgttaaagaaatacaaagcaatgcttcagtgaggtaccactgcacacccactagggtagccataatcaagaagatgtacagtaacaactgctagtcaggatgtggagaaatgggagtccttataggatctaaaatggtgcagccactttggaaaacagtctggcagctctgaaaagtttaaatgtagagttaccatatgacctagcaatgctactcttaggtatccacccaagagatatgaaagcatatgtccacacaaaaacttgtagaggaatgttcataacagcattattcataatagtcaaaaaagtagaaagggccaggtgcagtggctcatgcctgtaatcccagcactttgcgaggccaaggtgggcagatcactaggtcaggagttcgggagcagcttgaccaacatggtgaaatcccgtctctactaaaagtacataaattagccaggtgtggtggtgcacatctgtaattccagctacttgggaggctgaggcaggagaattgcttgaacccgggaggtagaggttgcagcaagccaaggtcatgccactgtactccatcctggccaacagagtgagactctgactcaaaaaaaaaaaaaaaaaaaagtagaaagaacccaaatactaatcaaatgatgagtggataaactaaatgctttatattcctacaatggaatactattcagccataaaataggaatgaggaatgactgataatgggcatggagtttctttttatttatttatttattttttttgagatggggtctcgctctgtcacccaggctggagtgcagtagtgagatcatggctcactgcagcttcaacctccttgactcaagtgatctctcgtcccttcctccttagtagctaggattacaggtatacacaaccatgcccggctaatttttttttttaaagacatggtcttgccatgttgcccaggctggcatccaactcctggcttcaagcaatcctcctgccttggcctcccaaagtgttgggattataggcatgggccactgcacctggcctgaattgtatgctttaaaagggtaaaaacctattttgtagtatatgaattatatctcaacaaagctgttataaaataaaccttgctgaaggaaaaacaatagtgctaatggaagatttgtacagagtaatgtatatcatgtagtcctattcattagctgaggatgggccacaaatttggctttctagcaactcaggaaaagtcggtgatatcaggctgggtatggtggctcatgcctataatcctagcactttgggaggccaaggaaggaggatagcttgagaccaggctgggcaacatagtgagaccttgtctctacaaaaaataaacaagattagccaggtgtggtggggcaagcccctgggaagttgaagctacagtgagctatattcaggccactgcactccagtctgcactccagcctgagcaacagagcaagaccctattgaaaaaaaaaaaaaaaacagaaaaagaaaaaacaagccaggcatggtggctcacacctgtaatctcaggactttgggaggctgaggtggacagatctcttgagcccaggagttcgagaccaatctggacaacatggcaaaaccccatgcctacaaaaaaaaaacagacacaaaaaattagccaggtatggtggttcatgcctgtagtcccagctactcaggaggctaaagtggaaggatcacttgaacctaggaaatggaggttgcagtgagtggaggtcatgccacagcattccagcctgggcaacagggaggcctcatctcacttaggaaaaaacaaaattggccgggcgcggtggctcatgcctgtaatcttagcactttgggaggctgaggctggcggatcacctgaggtcgggagttcgagaccagcctgaccaccatggagaaaccaacctgtctctactaaaaataaaaaaaattagccaggcgtggtggtgcatgcctgtaatcccagctactcaggaggctgaggtagtagaatcccttgaacccaggaggcggaggttgcagtgagccgagatcgcaccattgctctccagcctgggctacaagagtgaaacactgtctcaaaaaaaaaaaaaagaaaaaaagaaaattgatacacatctgacataggtactgtttttcttcatgttgcatgaagaaaaggagtcttatacaagttaagtaacttgccttggaaccccaagttggggtttttaacccaatctgtctctactaacaacttggtacagccatggaagctgaatgatgtcaatgaaacatgttgaggtgaaatacctagccatgctgatctgtcctgttcccttttctaaatttttatttttatagtttttggtctttcctttcagggcttaaatgcttgtttaaaaagtaagatgtatttattctacttgtttgtggttagaatattcatcgtcttcatctttcttatatattgatttccttgtttttttaaaaaatctttgtaaagtagctcatatgatacatactttcataaagaaagggcgaaaacctaagagagcattgtttagagattaatcatgatgtcacctcatttttgaaataacttaatgataaagagatgtttctcaggcagtctggatgttaacattttttgttttttattagaactctagagtaggatagaagaggccttttaataattctattaaaaagtaatggataggctgggcatggtgcctcctgcctgtaatcccagcactatgggaggtccaggtgggtggatcacttgaggtcagaagttcgagaccagcctggccaacatggtgaaactccatctctactaaaaatacaaaaattagctaggcacagcagtgtgtacctgtagtcccagctgctcgggagactgaagcaggagaattgcttgaacccgggaggtggaggttgcagtgagctgagattcccgccactgcagtccagcctgggtgatagagcaagactctgtctcaaaaaaaaaaggaatggataaatttcactgaatgtcacttgtagtgaacacatatgataagaacacaattaagaatttacaaagctgctgaggcaggagaatggcgtgaaccagggaggcggagcttgccgtgagccgagatcgtgccactgcactccagcctgggtgacagagcgagactccgtctcaaaaaaaaaaaaaggaaggaaaaaaaaaaaaagaatttacaaagctgggctagcgtcaagagattggaacataaaactagatttcagatcaaaggttctgttttggaatttgtttgacttattttatgaccttgacaaagttatttcatttgtggctcatgtttcaacttccacaacagtgtacttttgggagacgctgttatttaacagggaactgctttgaaatgcaatgtaatttaagtgaggattttcattagctgaaaagttgagatgccatggggtgtgtgtttttccatcgctgtttgacttgggtcacaatcagtcattgttcttacaagttggagataatatagagcttttaatttttttttaatttatatttgactttctgtccactttgaagatgattataatccattgacttatttctaataatttttatacctctttatttagctctgtagctttcctggtttagaaggtaaaatggacaatggaatatatagactcctagaaccttagaattggaaaagaccttaatcatttagtccaacctcctactcttttatgtgattaaagcttttagttcattcgagtttgcatttttgtgttatgcaacacatcttcaaaagcaatatgctctgtctcagattctgagaaggtggcagccatccttatacacatttgcttattcgtaaatattaattgcacagtggaccaagcagcgtgctatgtgcagaaggatacagggtgaattagatcggagactagagggaattcagacatttcagcaagtaaacacagtctactgggttaagtcctataaatattacatgaataagaaaattatcttgtcctttgatagtaggagggaaagaatgtcaagggagccatcataaaaaaaaagttggagtgttgtcttaaaggacgtttggaatatgaaaggcagaaatcttcagggagaaggagaagtgctggggaagcaagtcaaggcaaaaggaaaggtatatgcgcaaagggacagacacagaaggggagagcatggctggagttgcagcgtggtgggttagagagtacacagtgtggaggaggagggagaagcctggtgaaggtgagtggacatgttgagaaatgcctaatacccttggcgaaagaaacttgaatctttgttatccatctgtgatagggagctgctaacatttagcctgagaactaacctggttatatttgcattttagaaatattctagtggcagtgtacagaaggggttgcagtggggtaaacacagagccaaggaaaccttttaggttgctgtaatagtgagggcaagaggtaaggaggcaacatcaaaggagaggaaaggatcatttaagctttaaatcttcgggacacattgataggacttgactcagttgtaataataaaaggtgactatggggacaaaaaagaagagtccaggtttctggcattaatgagttggtatctacagtagctagtataggagtagctgatggattgtgtttaaacggtgatttggagtcatcaaatgctttattctttgtgaagcctttcctgattgacacacctctgcctgattatggtctttctcttcttcaaggtggcagcacttttcatagttgtgcttatatgtagttatttgtatgttcagttcgtttccattgttcacttcttgaaggctggggctatttatttatttattcattcaatttttagacagaatctcactctgtcacccaggctggagagtacagtggcgcaatcttgacttactgcagcctccgcctctcaggtttaagtgactctcatgcttcagcctcccaagtagctgggactacaggtatgcaccactgtcggcgcccagctagtttttgtattttcagtagagacagggttacaccatgttggccaggttggtcttgaactcctggcctcaagtgatccacctgtctcagcctcccaaagtgctgggattacaggtgtgagccaccgcacctggccaactggggctattcttatttatcatagtcccctgcagccttgaactcctgggctcatgtgatcctcctacctcagtctctcaagtgattaggaactacaggcacatgccaccatgcctggctttttttttttttttttttgtatttttcaggtgtcactatgttgtccttgctggccttgaattcctggcctcaagtgatcctcctgcctcccaaaatgttgagattacaaatgtgaaccatggtgccctgtgtaattccttcttctaacacctacttttaatgctccattttagacctacacaatcagaatttctaagacagtacctgggaatctgaaatttaagatctgcctgtgattctaatgatcactaatgttttcaaatttatatgtagagcagtgaatgggcgggtggtagaacagttttttcttattaactttgctatcaaatgacagaaagtcagttactaacttcagattttaaaatgaaagtgtaaagatggtactgacatctttctcttgaaaatgatctcagaataacaaggagaagaaatatgaattctgtgctcagtgacattaggagacagaagaaaaccctgtcgacctaatgggaaaaaaaatgagcaaacttaatgtaagtagagagtttatttgggtcaaatttgaggactacaagcctggagcatagatccaagactcctgttaggagcagttacaagtgggttttttgttttgttttgtttttgagacagagtcttgctcttttgcccaggctggagtacagtggtgtgatctcggctcactgcaacctctgcctcctgggttctagtgattctcctgccttaggctacctagtagctgggattacaggcacttgccactacgcctggctaatttttgtatttttagtggagacggggttttaccatgttggccaggctggtctcaaattcctgacctcaagtgatccgctcaccttggcctcccaaagtgctgggattacaggtgtgagccacttggcccagccacaagtgggtgtttttgtttttgtttttgtttttgagatgaagtttcaatgtgtcatccaggctggagtgcagtgatgcaattttggctcactgcatcctccatctccttggtttaagcaattctcctgtctcagcctcccaagtagctgggattacgggtgtgtgccaccatgcccagctaatttttgtatttttggtggagacggggtttcaccatgttggccagcctggtcttgaactcctgacctcaagtgatccggctgccttggccaaaagtgctgagattacaggcatgagccaccatgcctggccacaagtgggttctttgtttgtttgttttgtttttttgagacagagttttgctctcgtcacccaggctggagtgcaatggcatgatcttggctcacagcaacctctgcctcctgggttcaagcgattctcctgcctcagcctcccacacaggtgggttttttaaaggaaaagaagaggcaattcctaagttgtttgtcagtaatttatattaaaatatcataagctgtttgattgactttacattgttctttgtttcacaaattctaggaacatggagactatgggtggaggcagctggtcagggacaaaaatgccttcaaacagttgcacctgggcatgggggttgggccatcactgaagtctcatacccatgtttctctgggcctgataaattttgcatacctcacatagctcagtttgctctgagctatttttcatttttcacaccgtatgagtaggggctaccatgcccaccaacaatatataaaggttccagttggtccacatcctcaccaacactaggtatttactgtttgtttgtttttttattatagccattgtgtgggtgtgaagtatatcattgtggttttaatttacatttccctaataactatgttgaacaagtttttatatacttattgcccattcttatatcttcttctgtgaaatgtttcttcacatattcacatcttttatctctttttttaattaaaaaaaaaatagaaatgaggtcttgctttgttacccaggctggtctcaaactcctgtgctcaagtgatcctcccacctcagcctcccaaattgctagggttacaagcgtgagccaccgcacacagcctttttgtttgagttatattgagttatcagagtttggttttgtttttttttttttaagagacaggttctcaccctgtcacccaaactagagtgcaatattgtgatgatagctcactgcagcctcaaactcctgggctcaagtgatcctcctacctcagcctcccaagtagctgggactacaggtgtgtgccattatgcctggctaattgttttttatttttttattttgtaaagacagggtcttgctatgttgccaaggctggagtgcagtggctcaatcatggctcaccacagcctcaacctcctgggttcagtgatcctcttacctcagcctcctgagtagctgggactacatgtgtgcaccaccatgcccagctaatttttgtattgtctgtagagagagggttttaccctgttgcccaggtctcgaactcctgtgttcaagcaatctgcctgccttggcctcccaaaatatgagattgcaggcatgagccaacactcccagccctatcagagttcttaatgtattctagctacgaattctctctcagaatcatgatttgcgaatattttctccagtctatggtttatctttttatcttcttaatgatgtcttttgaagcatgaacaatttatgaagttccatttatcagtttttttctttcatgagttatgcttttggtgtcatatctaataactctgcctaattcaagatcataaggattttttaaaatgttttcttctagaagttttacagttttcacatttttagttaatttttgtatggagtagcctcctctacacaagtctgtgtaatgcaggccctggcagagcaaggtcctgagaaggagagaaaaaaaagttacagagtagagacctaacaaaaggagagtgataaaaagaggagaggaaacaaagggtaggtgccaaaaataaattaacagctacttgaaatttttgtgtcgagctcgtgcacattttagctgactccagtagtcaaatgcttccacatctatagtgtgcctgcatttctttaaagctactgataagatccgctcttgacctttaagggatgtcacattatttggaaatgaagagtcagggcttcagttccctgaatggttttggtttctgtttttctcacttataatgcatttgtaattttaattttatttatgttattattattattattattatttttactaacgacatggtctcattatgttgcccagactggtctcaaactcctgggctcaagcaatcctcccaccttggcctctcaaagtgctgggattacagacatgaaccaccatgccaagcccatttctaatttaaaatttatacactgtattttgtaaacattaaacttttctatctacagattatatggagaaccccattgtgatagaaaagtttggacttgctaaaatatgttttcaaaataacagttatccgtgtgtgtgtgtgtatgtgtgtgtagacacttatgtaatcatgattatttagtgcctgatatgtggtctgccaggtcaaggtcagactgtgcttaagactgcagtcttcctgaggaatatagctatgtgtagtttaaaaggtgagtgatcatgcctctaatcccagcactttgggaggctgaggcaggcagatcagaaggccaggagatcgagaccatcctggctaacacggtgaaaccccgtctctactaaaaatacaaaaaaaaaaaaaattagccgtgcatggtggcacacacctgtagtcccagctactcaggaggctgaggcaggagaatcgcttgaacccaagaggcggagattgcagtgagccaagatcacgccactgcactccagcctgaccaacagtgagaccctgtgttaaaaaaaaaaaaaaaaaaaaaaaagtgagtgaatgtatggccaggcacggtggctcatgcctgtaatcccagcaagcactttgggaggctgagacaggtggatcacgaggtcaggagatcgagaccatgctggccaacatggtcaaacccaatctctactaaaaatacaaaaattagctgagtgtagtagtgcatgcctgtagttccagctactcgggaggctaaggcaggaaaatcgcttgaacccgggaggtggaggttacagtgagctgagattgcaccactgcactccagcctggcgacagaacgagactctgtctcaaaacaaaaagtgagtgaatgtagttgagtaaaacatatccaacctggtagtctccatcattaggaaagaggaataataacaggaatagaggtcatattcatctgtctatctaattgtccttttagcagtagagtttgagagctaaggtaaagtagcatgaaaaaagtatcctaggctcattagactggactctgaattagtaatccatttaaagattattttcacaagtagttggtttcacaaccttctttgaatattttttgcataacagtatttatattctttttttttttttttttgagacagagttttgctcttgtcgcctaggctggagtgcagtggcacgatcatgactcactgcaacctctgcctcctgggttcaagtgattctcctgcctcagcctcccaagtggctgggattacaggcatctgccaccatgccagggtaatttggtactcttagtagagacggggtttcaccatgttggccaagctggtctctatctcctgacctcaggtgatccacccacctcagcctcccaaagtgctgggattacaggcgtcagccaccgcacccagcccagtatttatattcttatggaagggtcaggatttcttggtattgcatataaattattctgtagtaaagtaagaaaacatgaagggacaaatatacacaaactgtaagattagtggctacttctgtcagaggaagaagagaactttaatatcataatttaacaatttgtttcacagaaagatttaaaacaagtatttcagaatgtttggatttgttaaatcttggtgggagagtggatgtgtgggtattaggtttagcagtaattatttgtaaggatatgctgagattactggcagatattgaagagagattcaaggtgtaataaaattatttgtaggttaaatattgggaaatctgggttctttttccaactgtgctaatagttattgggggaaattcagccagatattgggcggaattcacccccaatatttcacgtaggttgttttcattttccctaaatgttggctggtctgagaaataaagggatagagtacagaagtgggaaattttaaagctgagtgtccgggggagacatcacatgtcggcaggttctgtgatgccccctgagccgtaaaaccagcaagtttttattagtgatttctacaggggtgggagtgtacaaatagggtgtgggtcacagagatcacatgcttcacaaggtaatagaatatcacaaggcaaatggaggcagggcgagatcacaggaccacaggacggggcgaaattaaaattgctaatgaagtttcgggcacacattgtcattgataacatcttatcaggagacagggtttgagagcagacaaccggtctgaccaaaaattttttaggcgggaatttccttgtcctaataagcctgggagcgctatgggagactggggtttatttcatccctacagcttgaccataaaagactgccggccccgaagcagccatttcagaggcccaccctcagggatgcattctctttctcagggatgttccttgctgagaaaaagaattcagcgatatttctcccatttgcttttgaaagaatagaaatatggctctgttcctcccagctcactggcagtcagagtttaaagttatctctcttgttccctgaacattgctgttaccctgttcttttttcaaggtgcccagattttatattgttcaaacacacatgctctacaaacaatttgtgcagttaacacaatcatcacagggtcctgaggcaacatacatccccctcagcttacgaaggtgacgggattaagagattaaagtaaagacaggcataggaaatcacaagggtattgactggggaagtgataagtgtccatgaaatcttcacaatttatgttcagagattgcagtaaagacaggcataagaaattataaaagtattaattttggggaactaataaatgtccgtgaaatcttcacaatttatgttcttctgccatggcttcagccagtccctccatttggggttcctgacttcccacaacaaatagtcaactttgagtcttggcaaatccctattttaagtgggtgttctttgggactgtgctcttggtccaactctcactttacgtagtccctgtgtttgacttcattcactctaatgactgactactatttatgattctaatggttctcaatataataaaaagaatgaatgcaaaaataaaactttcccctatagttctctgacttcttgtgagcatagaagtgattgcaggttttttttgttttttgttttgttttgttttgagacagagtttcacttttcttgcgcaggctagagtgcagtggcaccatctcggctcactgcaacctccacctcccaggttcaagcgattctcctgcctcagcctcccgagtagctgggactacaggcatgcgccaccacacccagctaattttttgtatttttagtagagatggggtttccccttgttagtcaggctggtctcgaactcctgacctcaggtgacccacctgcctcggcctgccaaagtgctggaattacaggtgtgagccagtgcgcccggcctgattacagtttttaaaaatctaaattttaacatactataaaaccttgaggaatcctctcctcatttattcacttgaacatcacccatgctttaataaagtaacaaataaaagggtttcagtgtatgtatggaacatatatagtcatattttttttaatttattaaaatgtaattttcagaagggtttcattgttaaacctgcatctatttttttaccttggttgtgacactgaaattctggaagcagtcgaaaaaagttttttccctcagtgttgtatgtggaaacttagaaaaaagaaaaaaaaattttcccaaatgaagaactaacatagtcatgtgatccatcacagtgagtctcagggaaacagatctgctagatccatgattccaatgttaaaaagaagactactttagagagaagttgctaccatatttttttttcctgtggcatttcattaatgaatgactgctggactgtcatggtcatttttaatgtttatcatgtcattgccttgtccagctgcaccctggtcagcacaaaataaccgtgtcctggtgttgccagtgcctacgagaatgcaaagagacctctttctaaaaccaggtctgacgtttcttcaaagaaacatccaagcattttcgttttaatgtcagcagtcatcattttcaccttaggtgtaacatctaaaatttatacttgcttgttccttatttactctttttggtctttactgtggaactgtagtgttctgatcttgaactggaacataaatggagagaagcttctctccttttctctgatttccctggaactaaatccaactctcgatattttattgaaaacaacaacaacaaattcacctaaatactgagacctctttttgagtcatctttattattattttgttaaagatgcacattttttttgttcctgctagggcatttagtttttatacaaagtagtccataataaaagaatttcatggccgggcacagtggctcacacctgtaatcccaacactttggaaggccaaggtggacagatcacaaggtcaggagatcgagaccatcctggctaacatggtgaaaccccgtctctactaaaagtacaaaaaaattagccaggcgtgatggcacgcacctgtagtcccagctactcgggaggctgaggcaggagaatctctcgaaccccggaggcagaggttgcagtgagctgagatcacaccactgcactccagcctgggcagcagagcgagactctgtctctctctctctctgtctcttctctctctcactcacacacacacacacacacacacacacacacacacgaatttcatttcagctccttagcataaaactgccttgactctctaagcatatatctaaaagggattttaaggaaattcggagagcctgtgactgtaattttgacttatatttgttatagattgaagaagagccctgttcagactatatttaagttgtgagttaaaatacctttacttatggtgaagttctcatctacattcctattggatattaactaattatttttgtttgtttgtttgtttttgtttttgagacagagtttcacccttgttgcccaggctatagtgcaatggcgcgatctcggctcactgcaacctctgccttctgagttcaagcaattctcctgcctcagactcccgagcagctgggattacaggcatgagccaccatgcccagctaattttgtatttttagtggaggcggggtttctccatgttggtcaggctggtcttgaactcccaacctcaggtgatccacccgcctcggcctcccaaagtgttgggattacaggcgtgagccactgcacccagccaaattcttaaattatttgtacacacccaaaggagtcttcttctggtatctatctgtaaggggccacttcccctgtagcctttttagtttgtgacttccattttgaaccactgatggttgcatcccagcaaggttctggagctactcagggcagttcatcaatccagctaatgacagtgaagattactgattgctctcagctattcctgtgacatggtttatccctcatccaattctccacgtttgccatttgaaatgttatatggtatgaactgtgtgctaggaggaaacttacaagtatcagagttaaaattcgtgtctgactagctcatagctgatcttcattattcttttatgagttcatgttaaatgtgctcttatccacaggatgaagataatggaatgaaaagtaaagttcatcatattgccaaggagatcatgagctcagagaaagtgtaggtatctagtttacaattcagaagactgttttccccccattggcacatttaaaacatttttttcattgttgttttttacaggtttgtggatgtgttaaaacttttgcatattgtaagtatctgctaatattttcttgaagtctaagactattcccttttgtactttccctacccctagaagttttcagcattactaacttaatgatagacattttctaaaatgtatgtatttcatatatgtagataacatgatttctgaaagagtcttagtagctatatgtccaaagtcttcaaactttatgtcttcataacagttttgaaggtgataatatattttcttaggcatttgctgaagatacttgctgttagagttttgcattagcaatacatgaagagcatcattatcattgtccaaaagtgtttttctcctacctaaataagctcccagaaacagatttgaaataggcaattttcttactatttttccttttactacctccatttaggagagattagaaatagacatttttacaactaagttttagttctattttctgttttttaaatggtcaacttttttttgtttttttgatttgagagagcatcttattctgttgcccaggctagggtgcagtggtgcgatcttagctcactgcagcctttcaacctcctgggttcaggcaattctcctacctcaggctcctgagcagctgggactacaggcactcaccaccatgcccagctaaattttgtattttttgtagagatggggtttcaacatgttacccgggctgatctcaaactcatgggctcaagtgatcaacccgccttggcctcctaaagtgctgggattactgacatgagccactgcagccagcctataattgtcaacttgaacagacttgttaggaaagaattatgatatgtgtcagggtgcatattcatttttctcatgcactcctttgtccttgcaggttttcacaagtttcattatgcattgacagttaaagtgcttttagggttactttatttcaattatatttaggcaagatattaagacttaagaaaggggtaaaacaaaaggaaaaggtagatgaaaatgaaaaaaggagttgaagtgacagtttacttatgtggtgtaattattaacatcataaattaggcttaattgtggagaaatgaaaggttcaccaaatatacatccatttaagtcttggcaaacagtatcattattttcaggttttctttgaatggatacatacaaacatgaaaagtaagttacacttaggcatgattcacattcactaaatgattacctgtgctctgtacttggtccaacagaaacccaggggcctggcatggtgtggtggctcatgactgtaatcccagcactgtgggaggctgaagcgggtagatcacctgaggtcaggagtttgaaaccagcctggccaacatggctaaaacccatctccgctaaaatacaaaaattagccaggtgtggtggcatgcctgtagtcctagctactcaggaggctgaggcaggagaatcacttgaacccaggaggcagaggttgcagtgagccaagatggtaccactgcactccaacatgggtgacagatcaagactctgtctcaaaacaaaacaaaacaaaaataggggcctgattcctatgtgaaaaatctgtagctttggaaattctttaaaaattcttaacattgctaatgtgttttgagaaaatatttccctgtgaatagtttctcacattgatttttggctatattggtaatattgataagttctctcttcctctctctctccttttttttaatgactcagtgtctcactttgtcacccaggctggagtgcggtggcatgatttccactcactgcaagctctacctcctgggctcaagcgatcctcccatctcagcctcctgagtagctgggaccacagccatccaccacgccaggctaatttgttgtatttttagtggagatgggttttagccatgttgcccaggctggtctcgaactcctgagcaatctgcccacctcagcctcccaaagttctggaattacaggcatgagccactatgcccagccagttctcttttgtaatagattttctttttttaatgataggacaaagctaggcatgggtagcacacacttataatcccacctattcaggaggctgagccaaaagaatcccttgagcctaggagttcaaaactgcagtgagctgattgcaccactgcactctagcatggatgacacagcaaaccctttttccaaaaaaaaaaggacaatgttttgtcaccctaacaaatttattgagtggcaagcttactgtcatttcatataaattataatatgtttaataaataagtggcttttcaaaatgaatttcttgtatatttgctgctctgccctgaacatccccaccacaccgtagacatctgatataattaagtacaagttaataggaaggtttttggttgtcttattgctctctgatgggagctagccttagtaaatatctcaataaaaatattatgtaaacgtacaaatagtctgcatttaaaaaaatatttgggccgggtacggtggctcatgcctgtaatcccagcaccttgggaggccagggcaggcggatcacatgaggtcaggagttcgagacagcctgaccaacatggagaaaccccgtctctactaaaaatacaaaaattagccgggcgtggtggcacatgtctgtaatcccagctactctggaggctgaggcaggagaatcccttgaacccaggaggcagaggttgcggtgagtcgagattgtgccattgcactccagcctgggcaacaagagcgaaactccctctcaaaaaaaaaaagtgtgtgtgtgtgtgtgtgtgtgtgtgtgtgtgtgtgtgtaatatatagcatatatagtatactatataatatatagtatgatatgtagtatatataatatactttgtattgtatatataattatatagtatagtgtatgtgatatgtagtatagcaatctattatatattatacatattttatatagtatatgtactatatattatatataatgattactattatatagtattatatatcatataatatactatatatactatatataatactatatgtatagtcacttatttatcaaacataatttatatgaaatgacaataagcttgacactcaacaaatttgttagggtgacaaaatattgtcctttttttttgaaaaaagggtttgctgtgtcatccatgctagagtgcagtggtgcaatcagctcactacagttttgaacttctaggctcaagggattcttatacatattatactatatatattatatatatataatactatataaaactatatataatatactatatattatgtataatatatgtgatatatactatgtgatgtataatatactatgtattatatataatatatgctatatattatatagtatgctatatattatgtaatatatgctatatatataaaatatgtgctatatataatataatatatgctatatattatataatatattatataatatatgctatataatataatatattatatataatattatatatgctatatgtaatataatatataatatatatgctatatattatataatatatatgctatatattatataatatataatattatatatgctatatattatataatatataatattatatatgctatatattatataatatataatatatgctatatattatataatatatgctatatcttatataatatatataatatatgctatatcttatataatatatataatatatgctatatcttatataatatatataatatatgctatatcttatataatatatataatatatgctatatcttatataatatatataatatatgctatatcttatataatatatataatatatgctatatcttatataatatatataatatatgctatatcttatataatatatataatatatgctatatcttatataatatatataatatatgctatatattatataatatatataatatatgtaatataacatatgctatgtattatataatatataatatatgtaatataacatatgctatgtattatataatatataatatatgtaatataacatatgctatgtattatataatatataatatatataatataacatatgctatgtattatataatatataatatatataatataacatatgctatgtattatataatatatataacatgctatgtattatataatatatgctatgtattatataatatataatatataatataatatatgctatatattatataatatataatataatatatgctatatattatattatatatatatttggaagggattttttagacaaagatggactggctatatagtattagtaatgaagcatctttgcttcactaatttctttaggtggagacgtacatttccttgaaaatttgagagactcaataaaatccatagagccagaggcaaggctaccctaggcctggatccagatgtctgttactaaatagatttttttttttttttgcattgtaaaaggaatagaagactttctcagttctcatttttttttccatgttaaaatcacttcatgctgtttcactgaatacaccctgacttttgagtcttgtgaaccattttcagcattttttctttagttgtaaagaatctttctctagcttctgttgacatggctaccaaaccttcactctggagcagcttctttcatgtgagaactgttcttcactgaatgaagctcattgttcagagtacctttgttttgctgctgaggtgttttccctaccttggtttggtatttccttctctttagatgcctctgtttcacagctgtctttccaagccttcagggacttgtggagagagggagggaaggtgacttgtggatcttaaatgatgttcatctaatcatttaacttaaccaaatcccctttagttaaataaatggtgttctattaagtgctctctatgttccttgcagcatgctatgttacatcaattatctgttttaatcctcgtaacaaccctgtcaaatagatgttattcctatttttttcaatgaagaaagtaagctaactgtcaaaaataacccactacttaataggaaaaccagactttcaagtctggtctgtctgagcccttgtacttagttgttctttagcaattgattgaaaattattacttgaaatctctaccatgctgtataggatatagtgtatctttggatatattagcttgctttcagaattcttttagttgccctggaaaccagagaaacttatttttcatcttctaaagatgacaatgaagctagattttggtcacttagagttattatgatgattacttgttagtgttattaaaggagattggaaactagacataaaagattgctttcaattatgttttctacagttttgcattgatgattatgcaccactgatgattatataccgtatcactgggtctacatatagagagggaagaataatttcattgggaaaatatttttattttaaaaacaaagtcaaatggttaatgtggggactttcccacctctacttttactccatagtttcacactcatttctgcatatttatcatagcactttgacctccacagctgctttgcttttgcttaaagtgaagtgattcctggtgtccttcatgaggacagggaaccttgtagggctccatgtctgtccatatgttcatttggtctttgtaattcattgtgtcatgatagtagttcagtaatgccctgaggtcaggcagctgggtcaggacagctggtaattaagtcacatacccctcattggtgctggagatataaaacctgaccccatgaacaaggccatctgttttgtgcttcattgcctcagatgctcatacttgattttatttgcattgattttttgcttaggtcttccctaagtgattcgagctggccaagctggtatgttaatatctcaaaagaattaaagatcaacttaaagttaatctgattctgatttgtaggttttggggaattagtaagaataatattatcatatgcttcataattcagaggcccatttctagctctacaaattccacattaaacaagcatttggttattatgaccagaaactacagtgtaggtggttcaattttgcatgcagaatctttggtaggttttgttgtaaggatgaagtcgaggtacttgatgctaacaaactctatagctaactaacattttcacactcttaactcctccccccactattttaatattttatttacccagcttttccagtgtgaaaaattaaactctggatctaacttttgaagagctaatcctgctgtcttgcatcctcaccgattttgtcaaggaggtgttagtgaatttagattcttctgcctcaaaatagctttgcctctggcttttaagtgtcatcacactttcccaaattatcctggttgttaacatttagaaaaataaccagacatatgttgtaataatccttttataaaaaaaagatgtcacctcctcccagtggcaccagttttgacaatggctgaggttcgtgaagagctgagaagttaaagattctgcgtgtggttcctgtgtgaattagttacatctggcattggggctgtagcacacagctgtcaggaaatggtggcccaagaggtgagggaatgagactggggccagggctgctgcatgtggttatggaggccaaaattgggagtggagcccaattattcagtgacacttgttgaagcaaaagcacagtatggcaggctttattcaggactatcacaatggcatagggggcctggcgcagtggctcgtgcctataatcccagcactttgggaggccaaggtgggtggttcacttgaggtcaggagttcgagaccagtctggccaacctggtgaaaccccatatctactaaaaatataaaaattagctgggcgtggtggcatatgcctgtaatctcagctactcgagaggctgaggcagtagaatcgcttgaacccaagagcagaggttgcagtgagccgagatcgtaccacactccagcctggacgacagagcaaaactccatctcaaaaacaaaaaacaacagacatagggaccactgcaatgggattttgcagtagtggagagagattgggctcaactccaaatatattacgggcaagtgggaatttatagccaaggaggagcaaagtgggcgttagtggatggaaaattactaacaagaaacttcaggagcaggggagattctggctaaaccaacttaagaggattcttgctgaagacggaccagccagggtgatcatacatcacctgggcaatggtagaggatgaagaacccgaacaatataaagggtgggaggttcttgctaaaactggattttacaagaaagtgcacagatgggcctaagaaaagattcaggaacctgaccagtacagaatctttgccgagtgcttacttagaatatgtaattctctggttggacacaatggctcacgcctgtaatcccaacactttgggaagctgagacaggaagatcacttgaggccaggagttcaaaaccagtctggccaacatggtgaaaccccatctctactaaaaatacaaaaagttagccaaatgtggtggcacacacctataatcccagctactcaggagatgaggcaagagaatggcttgaacctgggagtcggaggttgcagtgagctgagatcgcaccactacactccagcctggacgacagagcgagactctgtcgcaaaaaaaaaaaaaaaaaaggccgggtgcggtggctcacgcctgtaatcccagcactttcagaggctgaggcaggtagatcacctgaggtcaggagttcgagaccagctggccaacatggtgaaatccccgtatctactaaaaatacaaaaattagccaggcgtggtggcaagcgcctgtaatcccagctacttgggaggctgaggcaggagaaatcacttgaactcgggaggtggaggttgcagtgagctgagattgcaccactgcactccagcctgggcaacaagagcaaaactctttctcaaaaaaaaaagtaagctgggcgccgtggctcatgcctataatcccagcactttgggaggccgaggcaggtgaatcacctgaggttgggagttcgagcccagcctgaccaacatggagaaaccctgtctctactaaaaatacaaaattagccaggtgtggtggcacatgcctgtaatcccagctactcaagaggctgaggcaggagaattgcttgaacccgggaagcggaggttgtggtgagctgagatcacgccattgcactccagcctgggcaaccagagtgaaactctgtctcaaaaaaaaaaagtaactctgtgggtttcatggatatatactctcaaaattcttatagcctttattaagtgtacttctgctattttaattattaaatttctattttattctgacatactgcttttaatttaaaagaaaacattgtgggccatcagtccattccgagctacctgaaaacatccagtagtactgggaaaagcagagttttgcctggtgtgtgacaagggcctccatttagaggcagccatctcactggtcagttcagtttgtatttggctggtctctgttaaatgcgtcttaaataaacaagttccctttttggcaatggtggcagacatatggaatgcagggtctggcaaaagctgtgtcaaaccgggtccttaagttacttagcagctaacatcactgtcactgtcatggcagaggaaataccttccaactgggaaacaaaagttatcctgctgccaggagacaaatatagccattacttactccaccagaagaaagggtggcgcttattgctttgctgagcaaggaactcttgcatccagattatattaatcactaaactggtcaaaacaaaagcaaaaaagataaccatagaggatgtttaactattctgctttgaatacattattcatgatgtgtaaatgtattctatagccctgcatgatagcagacagcctaatgattttcaaaagtgttaagtggctctattttctcttagtaaatgtgagtgctgattgaagcaagctgttgggaggtgaaatatggctgatatccatttggtttctggagatgttctgagtggttttctggattagagcttataatactatgagaattaaatgctcttattttatatgatactaattaggtatacaagttagtcctttagttactggtgtgagtagttggctcctttgggctaatgtgactgtgggatcaataaacttagtcccaggtactgagtcctaagtgaaaggttttttagcattgattaagcataagaggactggacttcttcaaaatagccatcctttagaaaaagaatcctttcatatactttaagttatctatgaggtttttggttgtccagagttaaaaaaaaaaaaaacaaaaaaaaacaaacctcatggttaatatatgtatgttaggggcaggtgttgaaaggatcattggaaggaacagtatacttttttggttgatttcatttgcccggtaaatccctgaagggaaagcagttggaaataaaggtaagggaagataaggcctattagtcatttacccaaactttgctttcagattttaattaaaactgctgtttctaaaaaggaaaaaatctttgtttttgaatcctcaggactgtggaacagatttcactctgttttacttatatcttgaggcccacccttaggggacaatgaaatctaggcaaatacttatctcctaccccaccctttccaagtgctctggagtaatagggtgcggtgatattgacctatattaaaacatggtacagatagtctagagaacagtaaatgaaaaataataggtgaagagaaagattcttatttgtgaaaagtgtaaaccctggtgaatttattgagaggttgacaagagggaggggagaatttcaggtccagagttaaaatgtttcattctgtgtgccaactgcattgcaaaaaaagttttatgtgcaatatctaattaaagtctcataactagtattatactcatttagcagatgagggaaatcaggctggcccaaggaaacacagtaaataaggagcaaaggcttggatccaggattctgattatcaagcatgtgcctgccaggcacggtggctcatgcctataatcacagcactttgggaggccctagtgggaggatttcttgagctcaggagttcaagaccagcctgggcaacaaggtgaaaccttgtctctacaaaaaatagaaaaatgggctgggtgcagtgggtcacacttgtaatcccagcactttgggaggctgaggcgggcgaatcagaaggtcaggaattcgagaccagcctggccaacatggtgaaacgccgtctctactaaaaacatacaaaaaatcagctgggtgtggtggtgggcacctgtaatcccagctactcgggaggctgaggcaggagaatagcttgaacccgggaggcggaggttgcagtgagccaagatcgcgccactgtactctagcgtgggtgacagtgcgagactccatctcaaaaaaaaaaaaaaaaatacaaaagtgagcctggcatggtggcacgcgcctgtagtcccagctactcgggaagttgccatgagctgagattgggccactgcgctccatcctggatgacagagggagacccacaacacgtgcctctctccacatgcctcacctaggatgctccagttgttgggaaatgatgactgaaagtggacagtgggactcttaaatccagaataaaattagctaagatctcctgggaacttttaaaataaatggattgtgtttatattgatggtattggaataattctaaagactatttagaattgcattacaatttccagacactcgcttagtataattgctaagtttagagatcaaactaaaaggtttaagataaatatcatatagtatgtttgaaaatcaaataatcgtctcactattttttatttttaatttcctatctaggtgagtggggtaggaggaagggggtactttagatttgtaattctgcatgagaaatacagctgtgcaatctgtatcattttagggaggagggggactgaggataaaagcttgttatcaagttacatgtgtgtgtattgtttttcctgctctggactgtaataggatttccgggatgcagtagctcatgcttccaggcaacttgggaaaccagtgattgaggaccggattctaaatcagatcctatactacttgcctcagctgtatgagctcaaccgggatctcttgaaggaactggaggaaagaatgttgcactggtaaaaatggaccgttttcagattttcctagtgtttccaattttagatgaagccataagggccccacatgtgacagagatatattttcattacattgagttgtttgaatatattgtctttgcagttatccatagattgattttgttttgtttgttttttgtttttgagatagattctcattctgtcgcccaggctggtgtgcagtggcacaatctcggctcactgcaacctctgcctcccgggttccagcgtttcttctgcctcagcctcccgagtagctgggattataggcgtgtgccaccacgcctttctaattttttgtatttttagtagagatgaggtttcaccgtgttggccaggctggtctcgaactcctgacctcaggtgatctgcctgcctctgcctaaagtgctgggattacaggtgtgagccaccatgcctgaccagattgattattttcaatggcccaaaattcacaaccttggcacaccaagctcaatactattattttaaacaaatctttcgtaatcctgcctcagaagcaagatgcagccgatttaaatttctataggtgaacttgggcaatcaagatttttgagattcagtgtagatagatgctatatgctatattcacattagaatagtttctaaatgttttatttaccttctggagctgcaggtcatgaaactccctttccagttttgaaaaagaggccgttcactgaaataataggatggttgttttggaaaagcaattttttttttcttttgagatggagtttcactcttgttgcccaggctggagtgcaatggcacgatcgcagctcactgcaacctctgcctcccaggttcaagtgattcttctgtctcagcctcctgcgtagctgggattacaggcgcatgccaccatgcctggctaatttttgtatttttagtagaggcggggtttcatcatattggtcaggctggtctctaactcctgacctcaggtgatccgccttggcctcccaaagaaaggcaaatttatatatgtatgacatgcttgtagaagctgtagatttaagaataggaaaagaataccaaaaggttggtattggaagctacttccactaggctgaagaaaataagtatgcagaggcttggtgacttctgtggaaataatgtagaaagatgggtgtaggaggattgaatttactgttgaaaaccatggggaacacaacatgattagaataagaaaatagtatcacctactttcatgttcaaaatttctctaagctttctttatatataaaccagaaaaatacctctgcttgttttggaaatatcttgcctctatatgttgggtaaatatggcagataagcaattaatacatagccgtagcctaagtataaaataatacacaatttaggactgagaaatgactaaaatgtagtctttaaaggtcgtgataggccgagcacggtggctcatgcctgtaatcccagcactttgggaggctgcggcgggtgggtcacttgaggtcaggagctcgagaccagcctagccaacatggcaaaacctcgtctctagtaaacttacaaaaattagccagacatgatggcagatgcctgtaatcccaactactcgggaggctgaactgggaggcggaggctgcagtgagccgagattgtgccactgcactccattctgggtgacagagcgagactcctttaaaaaaaaaaaaaaagtcatgatagaaataaaatataactggctgggcgctgtggctcacacctttaatcccagtattttgggaggccgagacaggcagataagctgaggtcaggagtttgagaccagcctggccaacatggtgaaaccttgtctctactaaaaaacaaatctttttttttttcttaagttaaaaaaaaaaaattggggcttatttgcttccgattttttttttttgagacagattttcacctcttgcccaggccagagttcagtggtgtgaccatggctcactgcagccttgacttccctaggcttaagtgatccttccacctcacccacccaagtagctgggactgcaggtgtgccccaccacgcctggctaatttttttaattttttgtagagacaggttgccctgtgtttccttggctggtcttgtgctcctgggctcaagtgatcctctcgcctcagcctcccaaagtgctaggattacaggcatgagccactgcacctagcctaattttctatttattaaaatatttttctcttagggttcaagtcaatacatattctttggtgttagttgactttctgaaataacatttttccattggcttttaacaacaattgatgaaatattttattttcacattcaagaaggtttgcatatctactatgtgctagtctgtgctcttaagtatgcagaggatatcacagtgcacaaaacagacatcctgctttcatggagcagacatttagtaggggaaggaccagataaatagacaagaaaactaccagaagcagtttctgagttgcagagacctgaaataggacgctgtggtagcaaatgaagcttgagtggtcagggaaagccctctgtgaaggtggcatatttacagtgatatctgaaaggaaaggagcagccagccagggttctatatttccaggcatgtagaaccattagtggaagtctgcatagtggaaatgaattccatgtctccaaagaagataaagaaggccagtgtggtgggagagaaatggggaagaggaagagaagtgtgacaggggtcagaaagggcaggcctttgtatgccaggtaagaagtttttttttttttttctttttcttttgagacattgtctcactctgtcgcctaggctggagtgcagtgggcacaatctcggctcgctgcaacctctacctaccgggttcaagcgattctcctgcctcagcctcccaagtacctaggattacaggcgcctgccaccatgcccagctaatatttgtatttttagtagaggcagggttttaccatgttggccaggctggtctcaaactcctgatcagaagtaatctgcccgtctcggcctcccaaaatgctgggattacaggcgtgagccatcgtgcccatccaaggagtgagtgagttatttatttatttatttatttatttatttatttatttatttttgagacagaatcttgctctgttgcccagactggagtgcagtggcacaatctcggctcactgcaacctccccctcccgggttcaaacaattctcctgtcttgggattacaggcatgcaccaccatgcccgactaattttgtatttttggtagagactgggtttctccatgttggtcaggctggtcttgagctcctaacctctggtgatctgcccacctcggctcccaaagtgctgggattacaggtatgagccactgcacccagccatggtaaacattttttaagagtctctccttgtgttgaagaatggtttggagagggcaagaatggaagcagggagaccagttagagtccaggcaagatgggatggtggcagtggaaatggtgaaaagtaggcattttgaggtatgtcttacaagaagagaaaaaaagataagttggcggcttagatgtggactctgcgtatcattgcatatgttcatcaatctctctttatatttttttgtgtatctcttctctatccataggactgaacaacaaagaattgctgatatctttgtaaagaagggaccatatctaaaaatgtattccacatacatcaaagaatttgataagaatatagccttgctggatgaacagtgcaagaaaaatccaggttttgctgctgttgttagagaatttgaggtatttgctactatctaatgttgaacacttctctttctttttgttgttgaagctttaataacaagttgcagtcattgaaaacaaagcttgcaaacaaagaaaaagttaaaaagtaatcccttcaaaatcaaagatggaattgaacaatttaaatggtgagaactcaagaatgtacatgacttaattttgaaaatctgttattgcacatgggaatattttgacttggaaagaattttttttttgagacagagtcttgctctgttgcccaggctggagtacattcgcacgtagattggctcactgcaacctccgcctcccaggttcaagtgattctcctgcctcagcttcccgagtagttgggattacaagcacgtgccaccacacctggctaattttttgtatttttagtggagatggggtttcaccacattggccaggctggtctcgaattcctgacctcaggtgatccaccctgctcggcctcccaaagtgctgggattacaggcgtgagccactgtgcctagctggaaagaatattttgatgggactttttaaactgtggtaaaatacatacaacacaaacttagcattttaacagttttcaagtttatagttcagtaatgttaagtacgttgacattcttgtgcaaccagatccccagaactcttttcaacttgcaaaactgaagctctataggcattaaacattaactctattctctcttccctcccagcccttggcaaccaccattctgctttctgactcaatgaacttgattaaggaacatgtcttaacttttaatttaacttcttcttttatcctaacaattaacttacaatgatggatgggaaatagaatttatatttccctttagataaataaataacatggttttggtgccaaagttaagaaaaagtaataacctgttcagagcatgtgtcagccaaagctttgacttttaactcagagctgtgagggtggaaccctgatttaattagagataaaatcacaagtcccctccatcagtttggagtaaaatttgcgtactgtattttagtacttctctgttttgaagcttaaaagatcggtgaattccagtcacacaaaactagaagtgaaaagggttttttttgtttgtttgtttttgtttttgttttgttttttgagatggagtctagctctgtcgcccaggctggagtgcagtggtgtgatctcggctcactgcaacctctgcctccgaggttcacgtgattttcctgcctcagcctcccgagtagctgggatttcaggcatgtgccaccatgcccagctgatttttgtatttttagtagagacagggtttcactgtgttggccaggctggtctcgaactcctgatctcatgatccacccaccttggcctctcaaagtgctgggattacaagagtgagccacctcacccaaccaaaatgaaaagtttttaaaatagtatggtattgctgatttctgatttgtgcaatagacaaataattaaattttaaagtcatctgtaattttttcttcttttcctctcctctgttgtctttgtgctatcaaaaaacaaagtgcaatgtaattgtggcaactgatgattgacccaggttttggtaagagtccagtgagttgtgttaccttgttagcaaaagaaaacggggagccataaggccaggagaattagtaatctgggttaatgatgcttggatgaaagatactttcttaacatgcattatcattataatttcataatcactctgtgtaccagatagtggtggtacatatttagaaaatgataaaagtctgagcaaatctaacaaaacttatcaaccaacttgcgctatgttagaagcgtgactcttttttgtagttcttaggatgcagggacattttcacttggcctttttgatgccacctcacagtaaactcttaggttggagaatgagggtgaggctcaggaatgggccgagatagatgtctgttgtacatactaaggaagagaggtttcaagggataaccaaatgtctttgtagtcaagccaaaatgtggttccataatcaaatgttcctataaatgctgtgatttgggggctatctttttataaggccattcatctgcaaaagacttttacattcttcagacttcttaaagaagggatacttagcaaggccgcttttcaggttatctttactttctacagttctccctgccaccaccattattttgactatattgaccacaaggctctgattatcatttgaatccaattcctggcagttgtatttccactgccttattttaggggccatgcatttccttcttggtccattgggatttgtttgtatttatcaatacaagtgggagctgctgagtagggtgggctctaactagcctaggacacagactgtggctaccacgctctttgagagggttgttaacaagtttttcctaggagcaaatggtttcagggactgcctacaggaaagggtggaggttggtggtcagtctggctggggttcactctcagtgtatctaacagctgtaccttaaaataaaagggagcctctctacgaatctccttccagagttgcttgatgtttaaagtttggcttcctgagcacttgaatctgggtcccttgcttcttagaaaacactgtgttaatttagatgccttctcctttcagatgagccctcgctgtgctaatctggccctcaagcactacctgctcaagccggttcagaggatcccccagtacaggctgttgctgacaggtgggcttctccagcattttgccaaccacccagttggtttatccatcagccaactcttcttgcctttatgaaactcgggtgcctctctttgtatatcacccccgtcaccacgttgcctaatacgtggatttgtagattgcttatatactttacatatacgttgcctgaactgaacggctttcggttctttgatcatccatccatgtgtgcattttcacctcagggcattcatacatgtagctgctttttaattcagaacatctttgaccatcccaagcccatacccgtgcatcatttcacctggctaatattattaattccaagaaggtacgttccccaactactcgagagtggagtttagagggtcactcccacatatttatatagcattatcatagccctagttacttgcctcagaaggttgttataaggtttgattaatgagctaaatgtggacagtgcttagaatagtaccgtagctgggtgcagtggacacgcctgtagtcccagctactggagaggctgaggcgggaggatctttgagcccaggagtttgagactatcctgggaaacatagacccctgtctaaaaaaaacaggaataatgctttaattataacaagttctacataagtattagcttttactattattagtaatagtagtattcttatcctgatagttatttccttatgataatagtctatcttctactagactgtaagcttcaagattatagagctatgtctgtttagtaaggaaaaaagaaggaaagaaaaaagcaaaaacactgtgtttgagtgaaggaacttgctgtaatcaggcctttatattcactggctctttaaatcctcaccatagccttgcaaatatcagttttatcttcacagatgagataacaggcttattgaaattaagtggtttggcatcacaaaaaggctagtgtagtctcagtaccaaacatagttacccaacacctactactagggtctctggaatatttgctgaactgtattggatgtacagtgacttaatatgcatatataatacgcattaaaattgtatcaaaatggacaagaacgtcaaaatgtggccacaaccgtaaagtcaatgtgttctataagtaaatttggaggtactgggtttctgttactctccttaagaaatggtgtccatgcttttcttcttaacttcactctcttaagccaagagctatattggagataataggtgaatcctgaaaaaccaggatttcctcatttctctttagggaaaaggcttcagcacttcaaagcttgcctagtgacagactgctcacgaggaagacctaccttttagccccaggacaggctggagtgcagtggcgccatcttggctcactgcagcctccatctcccaggttcaagcgattctcctgcctcagcctcctgtgtagctgggattacaggtgtgcaccaccatgcccggctaatttttgtatttttagtagaggcggggtttcaccatgttggccaggttggtctcaaactcctgacctcaagtgatctgccgaccttggcctcccaaagtgctgagattataggcgtgagccaccacaactggcccttaatttaaatttctaaggatgaatcaggcactaggtttctgtctggaatgacataaagccaactgaataatttaaggatatcctgtccctctgtactttcttacttctgcttttggcagagatttagaatacacaggacaaagggaagtactgatacacatgttgtgtttttgctagataaactcagtgcttctcataaaccagctattgaatggcataggctctttccatagctgtcaaatgaagtactgtttttagtggcaaaagacagctgtagtttcaaatgggaggggaatggaacaagaatctgaaaatttagtgcaaagattaatttttacatattatttatttatttatttgtttatttatttatttatttatttgagacggaatcttgctcagttgccaggctggagtgcagtggtgcaatctcagctcactgcaaactccgcctcctggattcaagagattctcctgcctcagcctcccgagtagctgggactacaggcgtatgccaccacgcccagctaattttttgtatttttagtagagacggggtttcaacatgttggccaggatggtcttgatctcttgaccttgtgatccgcctgccttggcctcccaaagtgctgggattacaagcatgagccacggtgcccggccatattatttattttattttacacactacgactgttctaagtagtaaaaagtctacatatgttaaatttaggtttcatgcttagtttgttttttattgagaaagtgtgaaatgacaaaagcaggttttaaaaaactctctttactaaaatagattttaactaggtgtagtggcttatgcctataacccagcaactcaggaggctgagccgggaggattgcttgagcccgggaatttgaggctacagtgagccatggtcatgctactgcacttcagcccgggtgacagtgagaattccgtctcttaaacaaaagaagaagaattttgttttataataccaacatcatgtgagcttggagttatttttagtttgagctacctcttacttaatcttagattgggaaatcttttctgttatttatttatttatttatgagatgaaatcttgcctgttacccaggctgtagtgcagtggcacaatctcagctcactgcaacctccgcctaccaggttcaagttatcctccctcctcagcctcccaagtagctgggattacaggcacctgccaccatacctggctaatttttgtatttttagtagggatatggttttgctgtgttggccagcctggtctcaaacttctgacctcagatgatctgcccacctcggcttttccattcgttaattgttgcacaataccttatatataataggccctcgatactggtggatttgggaagggggaaaagtgatgaatggcttattcaaggccacgaaatcaggactaaaattaaagaacgtagtagactttgtattcttcatcctatgccttttcttccattgcttaaaattctttccttcccctaagcctgacctgaagtcaggtcagaagtccattctctttgtagccatctctgattgcttcagttctccaaccttgagttcagggagtgtgtcttatatctataatttagtggcctccaaaatatctgggtcagttttggatatgttgaagctgttcaggaagtaatttagattggttttaagctaggtttaaaacatctcaccaggtgtggtgtctcacgcctgtaatcccaacactttgggaggctgaggcgggcagatcacctgaggtcaggagttcgagaccagcctgaccaacatggagaaaccccatctctactaaaaatacaaaaatcagccaggcatggtggcacatgcccataatcccagctactcaggaggctgaggcagaattgtttgaacccgagaggcagaggttgtggtgagctgagatcgcaccattgcactctagcctagccaggaagagcaacctccctctcaaaaaaaaaaaaaaaaaaaaactctttagccaaaatgttttttgtccaaagaatgacattgagacaacatttatattagagatgatatcttctcctaaaaagaaaggcacaagcacaaaggtgaaatgtcctcccaaggctacacagctttaattgaagcacctatgttcctataatcctaaggacattcctataaccttgcaggtcaatactaaagatttgcttttttatttttatttttgtatttaagtgatccatcctgttaactgatgctttttatttttatttaaaattctgattttccagtactcatttttgtgatgttctgattactctttactttgcaagacatatctactgttgctgtgaaagtactgctgtctaggcactgagatttttttttttaaattttatgtaaaaacagggtttccccatgttgcccaggctggtctcgaactcctggggtcaagtgatcctcctgccttggcctcccaaagtgctggcatcacaggcctgagccactgggcccagtctgagattttttaaagttggattttaagtcttaaatttgcatctttcaaacatgttaattactttggataataaagctcaaatgatttaatcctccaacaactttgtgaggttaagtacttttatttccattttggagtttggattgattccaaatgcacaaaatatacaagagcaggcaggagtggtacttcattcatttgaggcaactcctggcaactttgctgttttaagtttcaggctgagaaggggaaggagtcctgcctgattcaatgtaagtaggtttgtgcctcccactgagatatgcatagatgataagataagatggtttcttctggaatccttttagaaaagatcagcggaaatccccagatagagcagtctgtcactgctgttcaaataaccatggtattgtcttccagtgttttcttttctggacttactttgggtttctatagggtattctatttgggcaatctcttcctgcatggtagtaaaacacttacacctacattcttgttagtatttttttaagatcagttcaaaccggatctaaaagaatgcatatagttgtataacaaaatcagtgatttatataatttaagcctaaatatttataaattttggctgggcatgatggctcacgcctgtaatcccaacactttgggaagctgaggtgggcagattgcttgagctcagaagttcgagaccagcctggccgacatggtgaaaccctgtctctacaaaaaaaaacaaaaattagctgggcgtggtagcatgcgcctataatcccagctactcaggaggctaaggcaggagaatcacttgaacctgggaggtggacgttgcagtgagctgagatcgtaccactgcactccagcctgggtgacagagcaagactctgtctcagaaaaaacaaacaaacaaaacttgtaaattttactcaaggccagtttatcaggctggatcctgtttgaagttgggaagaatgggaagaaaacagacttatctgttttcttaacttgtagttatcagagcagccttaacttttacttatcttcttctttctcatctcttccgggtagagaccatctttattatcctatcccagtgtcaggcatagatcctggaacacatcagagactcagtcaactgacaggtgtaattagggaaagggagagttgctcttttttataagattgagaatccccatgcggtagcagcaatgaatgttggatggatggatggatggatggatggatggatggatggatggatggatggatgcatgcatgcatgcatggatgcatggatgcatagatgcatggacggatggattaataaatgtttaaaagcattctttcagtcatccagtcacaaaattatggaaaggactgaaatccttcccttttctctttcctccctgtaggatctgccagcaaattttcctccacctctagtttctgctccttctatttctctgttaggctccaggccaggcccttctaaactcacgccattttatagcaatatcttgctggtggtcatgctacctcttatcacccctccatgtagcctagcacagttactgcctaatttctcttccaaggacacactttcattctgtttattagaaaagttgaaaacccacttattcatagtataaagaccagtttataacccagaattacctgaaccttcttttcctttagtctagctatagtaggtttcttgctgtctcctgaaagctgtccttcaaaaccagattctctcctccattaattactccaccaacaaatatttatataagttggccctgagctggacacccatatacactggcagacaacccagtggtggcccctgccctgatggggcttacagtcttcctctttgaggtcatgcccaatcacttaggcccccactgagccttctccttctcaattcctaaaaattgtattgatcttgccctttgtcttgtgactaaatcttttagttgtttaattataccatggatctgtgccttatcttctccactagattgtaaaccccttgaagtcagaggcagggctgggcatggtggctcgtgcctgtaatcccagcactgagttgggaggatcgcttgagcccaggagtttgaaacctgcctagtcaacatagtgagaccctgtctctacaaaagaaaaatttaaaaattagctgggtgtggtggcacacaccggtcatcccagctactgaggaagctgaggcaggatgatcacttgagcccaagagttcaaggctgcaatcagccatgatcgtgcctgttgtacttcaccctgggcgacacagcaggacccccatctcaaaaaaataaagtcagaggcagacttcagtgcaagtagcagtcacaaaagatactcactcagtttgagaaagtatattctggtgatgtgttatttttgtaagggccactttttgtctttgaagggatcttttgtgcatacaaaaatatttaaggattatgaaaaaactaagtcttttttcatcttctaccatccagagatggctatcacatatccttttagtttttttccatctacctgtgctatatgttgtataatttgtttttcagaaaaaagcctttcatttgtggaaggttattacattagtgttgaaacaagttaaatcagtaaggatcctgatagagaaaatataagatacaggaattttaaaattcctctgataagtcttttccacttatgtagttagaaaaaaatagtcctttgattaaatgtggatcaggtggtttctttgatcttgttcaaaatatttatgttatataaaaggctactttaacaacatattatattactttttctcgttgtctttgcctttaggatgatattaactgcctctaggttttagaaatctaggatttctcatgttggtagaaaatgagatatttaaaacatctgttatagtgttctgaagctataaatttgagctatgtacaggctaacaagcgcatataaaaaagatcacaattaaattaatagatgactttttttcttttgagatggagtctaactctgttgcccaggctggagtgcagtggcacgatcttggctcactacaacctccacctcctgggttcaagtgattcttctgcctcaaccgcccgagtagctgggactacaggcacgtgccaccatgcccagctaatttttgtatttttagtagagacggggtttcaccatattggccaggctggtctggaactcctgacctcgtgatccacttgcctcggcctccctaactgctgggattacaggcgtgagccaccacgcccagccgctaatagatgactcttttttaaaaacccttacggaaaacttctgtttagcaagtatttattttaaaacctagggttaattgtatgtatcaaagttattttaacactttctctaaggcagaacttgatttaaaaaaaaaaaaaagtagggctgtcctgcactccagacaaggaatctagttatctagtttctgacgagcccaaaggtgtctgatataaggtagttccaaccatgttaaattaggaagataatgcaactcagaattcagaattcatgttgtaatttgctcagttcttgttctgttgcaattcctgtttttttattttttatttttttgagaccaagtctcaccctgtcaccccagctggagtgcagtggtatgatctcagctcactgcaacttccgactcctgggttcaagcaattctcccaccaaagcctctcaagtagttggggttatgggtgcccactaccacgtctggctaatttttattgttctgttttttctttttctttttctttttttttttttttgagactgagtctcactctgtcgcccaggctggagtgcagtggtgtgatctcggctcactacaacctccacctcccgggttcaagcagttctcttgcctcagcctcctgagtagctgggattacaggcatgcaccaccatgcccagctaatttttttgtatttttagtagagatagggtttcaccatattggccaggctgttctcaaactcctgacctcaagtgatccacctgcctcagcctcccacggtactgggattacaggcgtgagccaccatggctggcctttgttttttgtttgttttttttaaagaacctttattgtttttatagttgcctcatatgctttcttgccagatgcctttggagcaggggctttctgggctggagctttttgacccttctgagcttttggaggaggtgctgccttctggcctgtggctttctgggcaggaaccttctgggctggagccttcttgcccacagcggtcatcttttttgctggaaatttagcagcagctgcagcagcacccttagcaacaggtgcttttttgagagaagctttcaggagagcttccttttgaagcttgttaacttcattcttgattattctgtccctcattttctttgccttcataactttaaaatgatcagaatctgtcatcttggctttcctttctctggcttcaatcttcctggcccattgtgtggctgcccattttgtattgatgtctaccttctgccaggcttgtgggacatacttctggtgggcactgtatggaaacttgaggatgaaatcagtgagctgcatgtacttgaaaggcatggcctgtctcctcacttgagcgcaaggtccaccaaccaaagccctgttctgatcaataacatctatgatcacaatgaattttccagcatgaggtccaaaggcgacgtaggttgcccagccaacctccatgaagtgcctgaacaccatattggcggcagtcggtgagaaggaattcatttttaattgtagttgtgaaaaaggtattttgagagatagtattgaataaattgtatccaggtatccacaaaatataaatatttatttatttattgagacatggtcttgctctgtttcccaggttagagtgtggtggcaggatcatggcttactgcagcttcaaccttccagactcaagagatcctcccacttcagcgtaccaagtagctgtggctacaggcatgcaccaccatacccggctaattttttctattttttttgtagagatgggatctcactatgttgcccaggctcatcttgaattcctgggttcaggggatccttccacctcagcctcctaaagtgctggaattataggcatgagccactacacctagccatccatgaaatattttaatgctatggaaagtgtttagggtatatgaggcaagcacatttcatcatcgcttctcggccttttggctaagatcaagggtagcacatttcatccacctgttttattagcttagagcttttaaatgtaatcttagtttctctgtagaacaggagttcttaaatttttttgtgcctagattcttctggcagtctgatatagcctatgagcccttctcagaataattttttttaagtgctgaataaactacataagattaaagggaaaaccaactgggctgaagtacagttattaaaaaaaaatttttttttgctataccacaatcacagtaataaaatattttttaatcatgacatagtaattaatgcatgcacttctttagtactgcattaaataagatcaggtggcagatgtaataagtaccacgattttgaagtaggggtgagaggagtgctaagagggataagatgtctgccacaactgtaatatgctataaaaatatctgtggtgataaagtcacagatatcactgatactgttgtggtttgcacctacatttatgatggaagaaaatcctattttacacgtagaggttagtgaaaatagggtgggtttgtttgtgtgcctctttttgccctccaagtttgcagataccccaaattctacccatagacattgctacaaagccattctttttccaattctaagtgcagatttgacccagatttcctgcaagtaaccaattgcctctgttgctgggacttgtcttggcagagctatagcaagcagaatctgttgctaaagttgctctcacagttttagtcagaatcatgggctctcatcaggacctgtttcagttggagaaaacactgaactttaatcaaatttgaactgtggtgcttacatttgctttattcttcgcttggctgttaggtaataaaatgtgcttatgtccctaaacgtaagtttgctttgttgatactcagggtggtacagaccaaatatgggtaacagcttcttttaagtgtggctcgactgtgccaaggccatttccgtacacttaagattcctgcttaataaactggcagctactagaaaatgtatccactaagaaaagcagtctcaggccaggtacggtggctcacgcctgtaatcccagctctttgggaggccgaggcagaaggatccattgagctcaggagttcaagaccagcctgggcaacatagggagaccccacctctttaaaaaaaaaaaattagccatgcatggtggcacacacctgtagtctcaggtactcaggaggctgagacaggagtatcgcttgagtccaggaggtcgaggttggtggaggctgcagtgagctatagcactccagcctgggcaacagagggaaaccctgtctccaaaaaagaaaaaaaaaaaggaagaaagaaaagcagtctcagacaagtcaagtcaaaatagtgtgtatattggccgggcgtggtggctcacgcctgtaatcccagcactttgggaggccgaggcgggtggatcacaaggtcaggagatcgagaccgtcctgaataacacggtgaaaccccatctctactaaaaatacaaaaaaattagctgggtgtggtggtgggcgcctgtagtcccagctacttgggaggctgaggcaggagaatggcatgaacccaggaggcggagcttgcagtaagcagagatagcgccactgtagtccagcctgggggatagagagagaccccatctcaaaaaaaaaaaaaatgtatattgacttttgcagtttgcctcttcttagaacattctggatatgcctagctagactttcccactaaaaagggacctggggagataccatctatcatgagatctgtgtcaaaattttgccttaggatgagcctggagttgggtttggtttgtgagttctgtggggatgccgcctcaggaccagggttgtgtcaaagtctaggatagatcagggcttccttacataattcttggacaaggatgcctgcaagcagttctccaacctgagcctcccaagtagctggaattacagacatgagccatcatacccagctaatttttgtatttttaatagagacagggtttcaccatgttggccaggcttgtctcaaactcctgtcctcaggtgatcctttccttgccatattttgtgccctggtgaggagggggtgcattggcccaggaaagggaccttttctaattcacagaaaggcaacctgagagcccagaaagatcgctttttttttttttgacagagtctcactctgtcgctcaggctgtgcaacctccacttcccaggttcaagtgattctcctaccttagcctcccaagaagctgggactggaggcatgcaccaccatgcccagctaatttttgtatttttattagggacgaggtttcaccatgttggccaggctggtctcgaattcctgacctcatgtgatctgcccaccttggcctcccaaagtgctgggattacaggcatgagccactgtgcccctcccgagatgacactttctaacttaggcaagcaccacatctataagaggtggttctaggccacatacagattcaaggactagaattgaatgagtatttgagaagcagaagaattagagccaaaggccagagccttttttttttttttttttttttttgagactgagtctcgctctgttgcccaggctagagtgcaatggtgcaatctcagctcactgcaacctctgcctcctggattcaagcagttctcgcacctgagcctcccgagtagctggaattacagacatgagccaccacgcccggctaatttttgtatttttagtagagacggggtttcaccatgttggctaggctggtctcaaactcctgtcctcaggtgatccaactgcctcagcctcccaaagtgctgggatgacaggtgcaagccactgtgcctggcatagcagatcttcttctaggtgcaggggctacaacaataattaaaatcaggctttctgtcctcaggaaggccacagttttagcatttgtgcataaaatgataccttatattatagtaccatttacttagcttctaatatattcatgacattacatattctcattaaacttaacttagaattttggagttttattgttacttgtcaaaatgattttgtgtatagaaataaataggatatgtacattgttaaataatattctgggaggcaaatgccagtgcatacatattctaaggcatcaacaattaaagttacacaatagcattgcaagaatagatctattaatttttttataaaaggaattattccttatgtaataaggaagtaacttgaaatggactgtttataagaatctaatgtatgacaaagtaggaaacccaagacaatagaaaaaagattgtttattaaataacctattaataatttgaaaaataaccagcctggccgacatggtacaacctcatttctactaaaagtacaaaaattagctgggcgttgtgacacacatctgtcgtcccagctactggggaggctgaggcaggagaatcccttgaacccaggaggcggagattgcagtgagccaagatcatgccactgcattccagcctgggcaacaggagagactccatctcaaaaataataataatttgaaaaacaaattaaggttcctacattaatacatatactacaaataaaatcagagctaaatatgaagaattataaaactggctatttattgaaactctaaaatgaggacaggatgaaagatagttttgtaggcccagaaaaattaattataaaggaatatatatatatatatatatacatatatatatatatatctttttttttttttgagacggaattttactcttattacccaggctggagtgcaatgatgtgaactcagctcactgcaacctccacctcctgggttcaaggggttcaagtgattctccggcctcagcctccctagtagctgggattacaggtgcctgccgccatgcccggctaattttttgtattttcagtagagacagggtttcaccatgttggccagtctggtctcaaacaactgacctcaagtgatctgcccgcttcggcctcccaaagtgctgggattacaggggtgagccacagcagccagcctgtaaatgaaaatattgacacttttcatttcattttatttattttattttttgaggcacatttgcaccattataataacattaaaatattataaaagtttaaaatacagtcaaagtaaaaaggcaaacagcacatcagaaaatatacctctaggaaattttcatttcagcacaaatactaaaaatagacatctagactaaaaatatgaacaaatataataacttagaaaaaaagagcacataataaatatatagtggtgtattgtgtccttcgaatgataactatcaaataaaacagttaccaattctattagcaataaaaaactgcagcacacaaaattggcatttactgaaactgttattctcatatatttgtattaaaagtttcacatccctttaggaaaggttttttgtgatatgtatcaagcacccaaaaataatttaatattttattttatttcattttatttttgaggtggagtttcactctgtcacccaggctagagtgcagtggtgcgatctcggctcactgcaacctctgcctccggagtttaagcaattctccttgcctcagcctcccgagtagctgggactataggcgcacaccaccatgccctactaattttgtatttttagtagagacagggtttcgctatgttggccaggctggtcttgaactcctgacctcaggtgatccacctccttcaccctcccaaagtgctgggattacagacatgaaccaccatgcccagcctaaaattttttttaactttaatttttttctatatcacaaatcatgaagcaaaaaaaataaaaaataaataaataaataaataaattattctccctgatcccaagaaaagaatctgaaatatggaagaaggcatgctttatttatttatttatttatttatttttatttatttatttttgagacggactcactctgtcacccaggctggagtgcagtgacgtgatgtcagctcacttcaacctccgcctcttgggttcaagcagttcttctgtctcagcctcctgggtagctgggactacaggagcattccaccacacccggctaacttttgtatttttggtagagatggggtttcaccatgttggtcagggaggtctcgaactcctgacatcgtgatcctcccgcctcagcctcccaaagtgctgggattacaggcatgagccactgcacctggcctatttttttatttttatttttgtttttttgagatggagtcttgctctgtcacccaggctggagtgcagtggcacaatcttggctcactgcaacctctgcctcctgggttcaagcgatcctcctgcctccacctcccgagtagctgggattataggcgtgtgccactacccccagctaattagtagagacaggtttttgccatgttggcaaggcgggtctcaaactcctgacctccggtgatctgcccacttcggcctcccaaagttctgagattacaggtgtaagccaccacaccagccgacagtgctaatcagtgttacttataaatccaaacccattaacttacaaaagtaaaagaggacagtatttataattatgcctggacagcaggtataaggcaggactatatggggagataaggttgtattgccatcctacttatgtaaatagccaaaacaaattaaatgcactaaagagctaatagaacacctaagtactgtatgatatacccctaggatggtttttaagtcaaatcaagcatttataaaaacaaggaaatagtttagtaattgtttttctcagagatgttcatagtttaagttttcctcattatttaatttttcaaatttttcattttttattttattcaacaaaatatgtttcatgatattttggaatgagaatcgttacagttttcattctggttcagcctagttattttatgcatgaggatattaacacacaaaaatgctatggggcatggccaaagtcccatgcctcaactagatgtggctggaccaggcagagtaagcatttctatctttattattattatcatcatcatcatctaaagacttagagatgggtctcactatgtgcccaggctgtatcctcccacctcggcctcccatagtgctgggattacaggcatgagccatcgcacctggcccaggaatttctgtcttctaattccagagcaagggctcttgaccacttcgccaagctgccttgaagtgtcagtatgttttgtaagttgacacttgatgcttgtttttggtatttaaaatgatcagtactttgtttcacaagtcaggctaattttaggttgtttcttgcaaaatctgaaacttcataaaactttacaaagtcatattgactagacttacttttctctggatcccataattctgtatgtgttgctgatcccactacatatttatggaggaaagaagaaatctgaaaaatacaaagcaagacatgtcctcaaattcaaaacacttgactttggaatgttatccctcctatacactcatttcctctgtgctttgctgccaaacatttctcagtgcacggtccaggaatctgactgggtgttgaatgcaaaaagtcccagattcccacagatgactaatttttattaatggttaacaggacttccgactagtttctgctctaagttggttatgtattgattaggtaatcaatgagtggtggtaaggctccctgggaacccttatacagaaaacttagatttccaacaagatatagtatatattgggtcctcatcctttctctctctctctttcttttttttttttttgagacagagtctcgctctgtcatccagactagagtgtagaggtacaatctcggttcactgcaaactccacctcctgagttagcaattctcctgcctcagtctcctgagtagctgggattgcaggtgcccactaccatgcctggtgaatttttatatttttagtagagatggggtttcactatattggccaggctagtctcaaactcctgacctcaagtgatctgcacacctcagcctcccaaagtactgggattacaggcatgagccattatgcctggccgtgggaatttgttattgttgttgttcttgagacagagtcttgctctgtcacccaggctgtagtgcagtggcacgatctcagctcactgcaacctctgcctcccaggttcaagcgagtctcctgcctcagcctcctgagtagctgggattacaggcatgcgcccccatgcccagctagttttgtattcttagtagagacagggtttcaccatgttggccaggctggtctcgaactcttgacctcatgatccgcccacctcggcctcccaaagtgctggaattacaggcatgagccactgcgcccggtggccttgggcattttatatgagaacaaaattaacttgtactggcaccgtggctcacacctataatcccagcactttgggaggccagggtgagagaatcacttgagttcaggagttcaagaccagcctgggcaacatagtgagacatcgtctctacaaaaaatcaaaaacttagcccaacgtggtagtacaggtctgttgtcctagctacttgggaggctgaggtgtgggacagccacttgagcctgggagattgaagctacaatgagcattggtcacaccactgcacactccagcctaggcaacagagcgagaccctccaaaaaaagaaagaaaaaaaaaaggcagcttgcatatccctagaagttgcacatagtatgttgtgttccagttaattttttgctactcatgttgggtgatggtgatggagttaattaacttttattaatcagtgatgccacctggtggccagagagtacattttgtagtgtacctacatgctgaaccaacatctgctttttttttcctttgataaaaataacctcagtggcatttgaggcagttttattagtgaagttttgaataatgctcaatttgttttggcaggagcagaaaggtcatagaatactaccagtctaacatggcaaactgaaatgactgctctcctcgttgttattaggaaagcttctgccgaataccaggtcctaagtgataggtaataggtggttcactatgaccaatataggcgtgtctgtctggtctcctttcctgggtttcacctgggttataacagttactggggcagctactggtttcctgttcctcccatctgactcagggtgatcagtcacattcttatgctgcagttaaggccccaggtgattcttaactgtttaaggagatccaggccctgctctctttgccaaggtaaaagttctcaaaaagatatactgcaagaagatgccctaaaaacatgaatggatggatggatgggttgatggatggatggatggatggataagttggagagttggattttgtagaccataaagatatttttaaaaattggcaaggagggtaaacctaactccgttacttccttgattaatagcatgatgttgcaacgtgttaacggtgggttttctgctcagtgtatttcaactgtgttcataaaagttcatgtttgagtacaagcaaagaaaatgcaacttagaagtttatgaggctcagcacagtgattctgaggtcaggatttcctaatatggacatcttctggggagcccttttggtttagagaaatgtctctgttttcatggatatacttctgtattaaaaaacagaaatttaagacaaactaggaagtcgccatgagtccaatatttaggtaaatctgcattccttcccacaacaagatatagtaactatctaacagcttaaggaaaatcacttgattaatgaggtagcttagggtttgagaacatctaatagggagggtagggtaagtttgtctccccaaccctgtcaactgtcagccatagaaatgttaaatgtttgcactcaccagacacggattatgtaatatattgaatgcattctgagtggggtcagagtgagaatatttattttcatctccagatggggctaagtgtaacatataacttatgtattttgttaatttgggaattttttattttttgtgtgtgcccacttcatttttcctttatattttgcgggggatgctctcttcattcagattaagatctaaattgctagcgatggtctctggcaagatagaacctatgccatggcgcagggaagcttaatatgtttatacataacatctcaccatggcttattgccagtgctggatatttataaggtgcacgtctagactcacacaggctcttagatcactgtctcaaagacttacgaagtttcagcaattgggcgcgtgtttgtgtcatctgttatgtttgaagatctggcaccaatacccctgttttcctttgttcctctgagcatgatgtcataaatccatgagatgaagttgtatctattccataatagtactaactagcagttgggtctgataaagatatattcagtcactgaacacacctttcctcctttcatttcctcagttcccactggcattagaattggtttcagcatttattgccttttacctcaactaaaatacaatcctatctaaaaaataatatattcttggccaggtgcagtggctcactgcctgtaattccagcactttggtaggctaaggcaggaggattgcttgaggccaggagttaaagaccagcctgggcaataaagcgagaccctgcctctgcaaaaaaaaaaaaaaaagcagacatggaggcacacaccagtagtcatagctatttgggaggcagaggcaggatgattggttgagtccaggaatttgaggctgtagtgagcaatgattgcagcactgtgctccagcctggacgacagggtgagactctgtcttgaatgagtaagtgaactgtttttattcagtaagcatttattgtcccctttgtgcaaagcccctgactaagtgctatgtgagagaaagatgtgtcagatgacttgctcacaaggagctttgagtctaatgaaaaagaaaatgatagaagcataaagtgagactgctgtgtcatgtgttattcaaaggcagaaaacgtttctttcaaatggaaattttgtaagagaaggggcatttaagaagagccttgaagagtgtgagtagaatttgtataagcgagacagaggaagggatggagaaaaagggactattagagacaaaaggtgtgaagccagggggacacatggggagtgtttaaggggttgcacagatcaaatttagtcagaacaaagggcccattttaggcagtagcaagagagagagaaaaattgatagggaccatgtagcagggggctttaaattccagaaaggaatttgtattaatttaacaggtaatgggaggccatccagcatttctcaacagagaaggaagtattgccttgaaattccatgacttaccttggtgttaaagatttattaaatataggttcttctattacctctttttctgtattacaagaactactatataccatattacttatttacagactatctttatccaaaccaaggtttctcaacttcagacctattgatatttggggtcagataatttttttttttgttgcagggctgcattataagatatttagcagcacgtctgacgtgtgtgtgtgtgtgtgtgtgtgtgtgtgtgtgtgtgtgtgtgtgtgtgtagtagagatggggtttccccatgttggccatgctggtcttgaactcctgacttcaagtgatccaccccctttggcctcccaaagtgctaggattacaggcatcagccaccgagtccagtctgcatctctgacttctaaccactagccaccagtagcccccgcttttccccagttatgacaaccacaactgtctccagacattgccagatgtaccctagggggcaaatttgtccccatttgaaaaccacctgtttaaatacatatattgagttcccttggtgtcctgagcattgttagactcttagattaacaaatccaggagacttttagggattggattaatgccttagaattttatactagacgtgtgtctgatctcaagattaaagtacttcctatgtgttgggataaaagctgaattgggcattaggagacctgaattctcatgctggctctgccaactagaggttgtgtgagttgggtgagatcctttgctcagtaatctgattcctcatctctaaaataaccaatgtttcctccaaggctttttctagctctgactctatgtcttgatttcaaattgatctcagggctttattttttcacatttttagaaagttagcacaagttggactagcatgtatattaaccagcaagactaatgaagtattgaaaaagaaagatatgtgtttggggctcactggtttattgtacttaaatacttttttttcttcttttctagattatttgaagaatctcatagaagatgctggagattacagagacactcaaggtaaataacttctgtggttgcagaagtttttatattatgtttatttaggtagggctagaaagtaaaaatatattgataacaaaatccattacaaactctcttcatacgacttgaagggcaggtgcggtggctcacacctgtaatcccagcagtttgggaggccgaggcgggtagatcacctgaggtcaagagtttgagaccagcctggcctacatggtgaaaccccttctctactaaaaaaaatacaaaaactagccaggtgtgatggtgcacgtctgtaatcccagcttcttgggaggctgaggcaggagaattgcttgaacccggaaggcggaggttgcagtgagccgagatagcgccactgcactccagcctgggcgacagagcgagactccttctcaaaaaaaaaaaaaaaaaaagacttgaggccttcctggaaactccattttgagcagattaacatagaaccagttaagtagtaaagcagtgctggggataggtgagatgatatgggcaggggagacccatggccagccctgcatgggaaccagcctcttgcgactgtgaagccagcgtggtggctgaggtcaggaatctttgccctcctgtgctcagtcactctgtgcccgtgccatattcagtttccctagaggtccatttctttgtctttcaaaaacagggattgaaccagatctgcaaggtcctcaagcttcaaaatcatgagtccatgaagtgactaaactacaaagcagggatgagtctaaaaaagcatattattctggcactgtctaacaataggatattagccttccctcagccctagtagtacttaagggaaacaatccattacaacatgagggactcatagctagtgggataattggagttcctgtgtctgtgtgcctgtgtctctctccctcacaatctctctccctccctctctcgcagatacacacacatacacacagattaattctgtttgggtgtttctgtttattcccaacaacctctttcaaatgtcacaggtataccccttgttctttttttgtttgagacagagtctcactctgtcacccaggctggagtgcagtggcacgatatcggctcactgcaacctctgcctcctgggttcaagcaattatcctgcctcagccccccaagtagctgggactacaggcatgtaccaccatgcccggctgatttttgtatttttagtagagatggggtttcaccatattggccaggctggtctcgaactcctgacctcaagtgatctgcccaccttggcttcccaaagtgctgggattacagatgtgagccaccatgcccagcaacgcctgggtctaactgcagaaacatgttaagcaagtccattaattttatgaattttgatcacattttttttttttaattttttgagacagagtcttactttgtcacccaggctggagtgcagtggcatgaacacggctcactgcagcctcaacctcctgggctcaagtaattctcttgcctcagccctccaagtagttgggattacaggcacataccatcacaccctgctaatttttatattttttgtagagacagggtttcactatcttgcccaggctggtctcgaactcctgagctcaagcgatccacctgcctcagtctcccaaagtgctgggattacaggcatgagccaccacacctggcctgatcacattcttgtatatcctttacatttgcagagtaaaaagtgaacatttttaaccctttttgtagagattcttatatattcttttaatcattttacttctcttaacatcttctgtttgtgtacattatgcttttaaaggcggttttttttaaaggaaaagcttgtggttggggatctgacaagtttcctgtcttcagtgatcatatctagttgatgaagaagtttataatatccatcaaataaagaacaaagcaaatgacttcaaagtaagggtgcaccgagcaggacagaattatttggatgacagagaaaagtgtgaaggttaaagaggcagggaagctttgcaggaaaaagtaggactggagatgagtgggagagtgggtgagaggaaaaatgagcattcccgacggcagcccctctcgtgaggatacaaattatacatggaacttatagaatagaaagaaaacatctgtcctgggtcctgggcttctgccttcaatgaaagtgagttattagctccattttacacataaaacaaattcagggtcagagattaaggagcttatttaaaggaaattacatgtgacagcaaagacatagatgagaaaaccagtgaacagtgaggcccactgtatggccagaggcacagcaatcatatggtgagcagtggccgggcgtggtggctcatgcctataatcccagcaatttgggaggccgaggcaggtgggtcacttgaggccaggaattcaagaccagcctgggcaacatggcaaaaccctttgctactaaaaatacaaagattagtggggcatgggggtgcatgcctgtaataccaggtactcagtagctgaggcatgagaatcgcttgaacctgggagatggaggttgtagtaagccgagatcccgcgactgcactgtagcctgggcgacagagcaagactctgtctcaggaaaaaaagagtggtgagcagtgtggatgagacttcaagggtgagggaaggtgaggcaagaataactttgaaaggtaggcagaagagttaaaggaatagaggcatcagggcctcttaacgggatgacgtggggaaagtagaatcacagcatggagtagggaaggtagagcttgggagaccaggtgaccaagtagcagcagcagctttgtcatccattaaatcttaaggcatctctcccctgtccaccgggaattccagcaggccagaaagcaggaaatgtgtccacggtaacctcttgaacctgctgtgaaaagggtaccaggcaccgtaaattctgatacatggctgagtaccgtggctcacacctgtaatcccagcactttgggaggctgcggcgggtggatcacctgaggtcaggagtttgagaccagccctgccaacatggcgaaaccccgtctctactaaaaatacaaaaattagctgggcatactggtgtgcacctgtaatgtcagctatgcaggagactgaggcaggagaattgcttgaatctgggaggcggaggttgagtaagccaagatcatgccactgcacttcagcctgggagacagagcaagactgtctcaaaaaaaaaaaaaaattctgatatatagtcagggtctctatataaggaaaaacctgctttcctttaataatagtgatgatgatacatgtggaaagaatacaggccgggtgtggtggctcacacctgtaatcccagcactttgggaggctgaggcgggcggatcacgaggtcaggagatcaagaccatcctggctaacacggtgaaaccccgtctctactaaaaatacaaaaaattagctggacgtggtggcaggtgcctgtagtcccagctacttgggaggctgaggcaggagaatggtgtgaacccgggaggtggagcttgcagtgagccaagatcgcgccactgcactccaacctgggtgacagagcaagaaaaaaaaaaagaatacagaagcctccacggctggtaccaggaagacagtcctttgatagattacaataactggaccaaaacacctcaaccccttttcagaaattgatttactgttgttgtttttgtttcgttttgttttgttgagacagggcctcattctgtcacctaggctggaatgcagtggtgtgatctgggctcactgcagccttgacctcctgggctcaaatgatcctcccacctgagcgccccaaattgctggactgcagacatgagccacgacacccagctaatttttggattttttgtggaaacaaggttttaccttattgctgaggctggtctcgatctcctgagctcaaatgatccgcccacctcagccttccaaagtgttcggattacaggcgtgagccaccgcgcccagccactcttttttttaatagtcctttttttgatgaccactgtcactgccacagcagcctcaggaggagatgcttccctctctaacactctaccagtttttctcagtgggaatgctactgtcatattgttctgaataatctttgtgtgggtttctaaggagtattgcatggagtttggcatccctgcctcctacccaccaaaggccagtggatcttcctggtcattgtgacaagcaaaaattgtctttacacaggttcacatgtccctaagggagcactatggccttgggttgagaataactgcagccccaaagctgagaaaatgcagactttttcctttagacctagttataaagatgacaaggctggagtatggaaaaacactttgctaaaggcaaagggttaataaaaagaataaaacacagataggcccatgaagctaataacccagctcacaaaatgacacttgcaaattcctaagatctgggatgcttccatgtggcatttcccccatttctaattcatgcctcttggaatcagactaagagactgagacctgatcttagtcatttcttgtagtttttatttcctataacaagatcctttttcctcacgatccttttctcccaagacagtttatactgggctggtccttatcttccaggtgaaatcccatccttatctttgtaaacttgaataggataatcaaatcacagcacaaaacaaccctgacattcatactgttagtaaacatggtctacagtgtctctttagagtcttcttttggctcattgtttccctatatattgttttggccaggtttttggtggtggtggtgttgtttggtttggtttggttttgccttcattgaaccttatatttctgcctactcacagtcaataagctcctccagaggttggttgctataaactagctatcttgtcccctggaattgcttaatgttgcaaactatttgtttccattgtaattactaaatgcacgttttgttcctgcctatttcagatgcccttgctgttgttatagaggtagccaaccacgccaatgacaccatgaagcaaggagtaagtgtcttgttgtcagtggctggtgtggtcttgaacctgaaagcccaggccttcatatgctttccattgtctttctgtaggacaactttcagaaacttatgcaaattcagtacagcttaaatggacaccatgaaattgtgcagcctggtcgggtaagcattttacattgcttttcgcaaacttaatacgatgcatttaggtaccatctgtatctgtttatcattttataaaaataggttgtttttgttactcttcattgattcaattttgatcactttatccgttcaaaacattcatgatgtaagtcactgtgacaattcaattaggaataagcccatttatgaagtaagtccagttcaattaggggagcggcaagggaccccacagagtatctgatttaatgggatcgttttcttgtgtgatgccagcgacctcacacagttttgaagacaatttcatttaacatctttaatgtaagagaggattatgaagggaggggggagattggtattttgatcctcctcatatagcacaaaagtggcctagggaattaattcgggaaaattacaaaatgcggttgtcaggatgttgggtatgcttcaggatcaagtacacgctcagtcaattacatgtgcctccatacagtatcccaggggccaatattggaattatccaaccctgcttgcttgtccgattcctaaatgatttaagggtttaaaattaactatgactgtaaaaaatctcaaggaaactgtggctccccagtctgtcatgaaaaaaattctcagggaagaaagttgaaaaggaaattatattgtcgttgtgttgtgatggtaggactaaatgggtgtttgtttgggtgaatcaggtttttctcaaagaaggaattctgatgaagctgtctcggaaagtgatgcaacctcgaatgtttttcctggtaagaggacttgtgtagttctgatgtggccgaggtagggatagttgcttaaggaaaggagacgtttatacatggtagataagcttagcaccttcaaatatcagcctcaccagcttcttgaactggccgtaccacttaattgcatttcaagtatgggaaataacgtctgttatgatgtataaccagaagattatttctttttggaatttattccatttctaacttggaaaattgttctaatcatttgtttaggcagactaatacctttgtgggatttagaattcaaaaaacattaaatctgttacagaacttggaaataaagcacgttttccagaaagtgccttttaaattatattctaataaacattctgggtagttctagtgtatatagcagaatataagtattttattcagagagctattagcaaagaggtattatttatcctttaatcttgtatcttgtcaaaatctttgtggcagtaatgtgtttctttactttctcccctgaaatgtttctactttcagtttaatgatgccctgctgtatacaacaccagtgcagtctgggatgtataaactgaacaacatgctctcactggctggaatgaaggtgtgtgcatctgttagatgttttgttttttgttttgttttgttttgttttgttttgtttgagacggggtctcattctgtcacccaggctggagtgcagtggtacaatcttggctgactgcaacctccacctcctgggttcaagtgattcttctgcctcagcctcctgagtagctgggactacaggcacccaccaccacgcctggctaatttttgtattttcggtagagacgggtttcaccatgttggcaggctggtctcgaactcctgacctcaggtgatcagcctgccttggcctcccaaagtgctggggttacataggtgtgagacatgatgcccacccaggtgatttgtttttaaacccaaataaggtcagtgtggtggctcacatgcctataatcctagcactttgggaggctgaggccggtggatcacaaggtcaggagtttgagatcagcctgaccaacatagtgaaactccatctctactaaaaatacaaaaaaaaaacaaacaaaaattagccaggcgtggtggcgcacacctgtaatcccagctactcaggaggctgaggcaggagaatcgcttgaacctgggaggcggaggtgtcagtgagctgagctcgcgcgactacactccagctggagcaacagagtgagactccttctcaaaaaaaaaaaaaaaagcccaaataaaggctgggcgtagtggctcacacctgtagtcccagcactttgggaggctgaggcaggataataacttgagctcaagagttagagaccagcctgggcaacacagtgaaacccccatctctattaaaaataataacaacaacaaatatatattttagagaaaattccctaagataaacatctttcttatatcctttacttttctgtctatatatgttactgtttatgcatttgttttgttttgttttgtttttttgtgacagagtctcactctgttacccaggctagagtgcagtggtgcgatctcagctcactgcaacctctgcctcccgagtttgagagattctcctgactcagcctcttgagtagatgggactacaggctcagctaatttttgtatttttcacagagacggggtttcactatgtcggccaggctggtctcaaagtcctgacctcaagtgatccacccaccgtcgcatcccaaagtgctgagattacaggcgtgagccactgcgccctgcctgtttatgcatttgattattcattcatgtagtcatttgttcactcatgcattaatgtattcataggatatttattgagaactactataaacaaaacagtaatgggtttggtggaagatatgaagataagttgaagcatgattcttattgtctttcctcccccagggacttagcaactagttgggaagacagtacactacacgtaaatacctataaagtagacagtaataaatatcactataaaggcacaattacagttttgggaattcagaaaataaagaacttgcagtgtttgatggtcatggtggggactggcctgtagcttttgagagcagctaggaaagaaggagaaagaggaggaagagccagtggaccttaaagtataggtcacatttggccatgctgagatgtaagggaaaggcattccaggtggagggcatactgtgagcaaagtcctggaggtgggaaaggtgggctggtgtgtgggcttttcaattcatctgaagcatagagtagatgaaggagaacagcagtagagaaagctggataggaagattggttgtggatgtaagcagccagggccattggacaacttcagctcattgatatggttttcagtaggatgagtcggctcaaattgttgtgctttcttccaggtcagaaaacctacccaagaagcctatcagaatgaattaaagattgaaagtgtagaacgttccttcattctctcagccaggtaaattttttcttcttctttttttttttttttttctcattctgagtctgcttgctagggaatgtcaggaaaattttggtttttggttttttttgagacagcatctcactctgtcacccaggctggaatgcagtggcacaatcacggctcactgcagcctccacctccatggcccaagcagttctcccacctcagcctcttgagtagctgggaccacaggcatgcactaccatacccggctaactttaaaaatatttttttgtatgccaggtgtggtagctcacccctgtaataccaggacttcgggaggctgagctgggcagatcacttgaggtcaggagtttgagaccagcctagctaacatgaacatgattaaaccccatctctactaacaatacaaaaattagccaagtatggtggcaggcacctgtagtcccagctactcaggaggctgaggcaggagaattgcttgaacccaggaggcggaggttgcagtgagcgaagatcccaccactgcactccagcctaggtgacagagagagattctgtctcaaaaaaaaaaattttttttttagagatggggtctccatatgttccccaggctgatcttgaactcctgagctcatgcaatcttcccaccttagcttcccaaagtgctgagattacaggtgtgagtcactgtgccggcctatttttaagaatacataaacatagatttttgtgagtataacagggaaagatattgccaacactttttgcacttaggttagctactgactttttgttcttctttttcttctttcccaataccgtgcagttttactcttgatttaccatgcaaggaagtggctgagagcagaggcaacagtatgctagaagcacagagattaaaatgttcttctgaatagaataacaatggtgaaagtgctttgctgatcattttttaagtggctatttcaaattgtttttaagaacaactagtgctttataggttattaggaaatttgtaggtgtcacttaaaggttctaacaaacctatgaggtaggtgtaatctccttctaaaaattaggaaactaaattacagaaaaatggagttgctgtcttacggatacatatttgacacagccaggatgcaaatcgaagtcttttgcttttaagtccattgttatgggctgggtgcagtagcttacgcctgtaatcaagcactttgggaggccaaggcgggtggatcacctgaggtcaggagtttgagaccagcctggccaacatggtgaaaccccatctctactaaaaatacaaaaaaattagccagacatggtggcatgtgcctatgatcccagctacttgggaggctgaggcaggagaatcacttgaacctgggtggtggaggttgcagtgaaccgagatcactccactgcactccagcctgggtgatagagcaagactccatctcagaaagaatggagggagggcgggaaaagaaatccattattatttatgataccaccttgccccagaccggaacctgcagtgacttaatatgttgccataatgtaattcaagtgctgaggaaacctgaaactctatgactcataaaaatacattactgagttactgactgagtggcggaagtgggtatttgggaaggtttgactggtgaagggagagatgccaatagtcatagcatgctccactgcacaatctaaataatgagacactgtcttctcagacctaacctttgatctaataaaaatagaagcaaacgcttttgtaacacttactgtatgccaggcaccatcataaagactttatgtgtagtacttcgtttcatcttcacagcaacctgtaaggcaagttgtcgttattatacccattctatgctgagaaaagccactcagctatactagcagagccaggatttgaaaccaggcagtctgtttccaattgtccataccactgaaatcaactaggatcttaggagcaggtggagtagtggccagaatcatttattactctgcatcagtcacagtgctcatgtttcgttttatatttattttctcttttaagttctatgataactttgtggggtggatattatcttgatcttccagattagaaaaatggaggctcagagaggttcaataacacatctaaggttacacgagtagtaagcagtggagctgtgatttgaacctaggtgtttctgacaacctttataattttgcttacgtccatgaatgtcaaggactcaaaccaaatgtctgacttcccaaaatcagaggaccacaagagtcatcctggggtgtgctactcctctgaaatgcaatggctactgctgcctgacatacaggatgacaggagaagacaaatacctgtgtctagggtttgtcaaatgcttcgcagctagcagtcagaacaagcaaatttcttgggggtacctgaagcatccaccagataccaatatttagagagtgcaggtaaactctcaatcacttagcattgtgactttttcttttcttttcctttattgttgttgtgttttttttttttttttttttttttgagaaagggtctcgctctgtcacccaggctggagtgcagtggcacgatctcggctgactgcagcccccgcctcccggcttcaagcgatccttgtgcctcagcctcccaagaagctgggactacaggcatgcgccaccatgcccagctaagtttttaatttttagtagagacagggtttcaccatgttgcccaggctggtcttaaactcctgacctcaagtgatccacccacctcaccctcccaaagtgctgggattacaggcgtgagtcaccacgtctggccatcttttttaattttaagatagagatgacctttcaccatattggccaggctggtcttgaactcctgacctcaggtgatccacccccactcagcctcccaaagtgctacaggcaggattgtgttcagcccttttttcgtttttgagggatagaggagtttgaacaaaagttcagagaacaaggccggtgctaagtggctcatgcctgtaatcccagcactttgggaggccgaggcgggtggatcacaaaatcaggagatcgagaccatcctggccaacgtggggaaaccccgtctctactaaaaatacaaaaattagccgggtgtggtggcgcttatctgtagtcccagctactcgggagactgaggcaggagaattgcttgaacccaggaagtggaggttgcagtgagccgagatcgcaccactgcactccaacctggcaacagagtgaggctccatctcaaaaaaaaaaaaaaaaaaaagaaagttcaaagaacattaagaccatgtatatcatgttcccagtgagtgcttgagcttggttcttaaaatcaagaggttattttcaaaattccaaggcagaaatgcctatagaaaagtcaagttttaattgcacttctatttcccaagtaaaaatgagccttggtgaaaaacagtaatctattttattaagattaaatcattcaagaaattatagtgaatgtttctttccttggttgttaggtgaatatctggatgttcatgatttccagatcagtaccagacaggtgtaatgaacagctctgatcaagatttatatttctgtgacttttttcttttttgtgacagagtctcgctctgttgcccaggagtgcagtgacgcgatcttggctcactgcaacctccacctcccgggttcgagcaattcttctgccctagccttccgagtcactgggactacaggggtgcgccgccatgcccggctaattttttttttttttttgtatttttagtagagatggggtttcaccatgttggccaggctggtcttgaactcctgacctcaagtgatccactcaccttggcctcccaaagtgctgggattacagccgtgagccaccatgcccagcaacataactatttccattcttcttatcaatcaaggtggcaacctctcttccgctgtcagctggagagagataactaccccgtgaatctcatccaagttcctgccagtggtagctgggtagacagcttcagtttcttgtcaggagcaaaaataaacaccataagctctgacacccattcccttttcttccaactcaggaggatccagcatgcccaacaagacggcaaggtcctgatccttaccatcaatgttgggaaaagggcatttttctgttcgctcatcactattgtaagcattgatatccttgctccaggcaagatggtcctcagcactgtctgttgcaagggcagtcaacttcacattgctcttggtgaattctggtgccagctttgcagctctgccaagctccatagtgcacactggtttagagtcccaagggtgggaaaaaagaatgccacaggagtctcctagaaagtcgtgggaacagatacagccaacagtgcgattagcctccgagttgggagccttgtggatggcagcagtagtgacatggtgggcgagacagtgtagccacggcagcaagcagccagctggtctgggcagtcctgtttgtgcttttgttagtagtctggggcttagtgataagcagtgataactgagagcaatcattgctgagtcaaactaactttagtgatgagagaaagtcattgtttggagactggcatatggagagctatgagggaaggcgattgtctgctatcaaccattaacaaatgtttactgggcatcacctaccctgtccaggagctgggggtgtgcaatccctgtccttaaggataagcttttattctaaagtgggagatacataataatcaggtttatttatatctatgcacatagaaataatttggagtattcaatgttataaagaagaataaagtaggctgagcagatagaaagtgatgaggtcaagaacttatatggggtgggggggggggggatcagaaaagttatctctgaggagcatcagagaccagaagcaaatcccagatggaaggaacagcaggaacaaaagacataccagggaggcaggaaagggtatagtatgttaaagaaacagcaagaattccaatataggtagagcctagtactccggggagagcctagtactcccctagtaccaggggagattaaatgtgagttacagtttaggggcaagagttaggggccacccatagtaaggtcattgaatttttaagagttttcagctaagtgataatatctaatttatgtttgtgaaagatcacaccggcttctttgtagaagacagaccatcaggagactacagtagaagttgggcagccaggtagtgagtgcccagcagatgatggtgtgtcttgggttaaagtgatgaacaatggtatgaatcagaaaaaaacccaataggattactaatgggctgaatgtgggctctgcaggggaaatcattgaactgaaaagttcttgataaaggaaaaataaatttccaagggaggatcaagctggcatgagggaaagagagctaaggcatattgaatgtcatcggtatgccatgctctccttccagattcctccaaccagttaggcaggtactgcatcccatattaaagtgggtaaggagtctctccatctcttcccaccaacacactgcatgctccatcagcacggatctgcgtgtgactccatgcatgccagacaactccacagccatctgccttccacaggtgttacctccacctgcagttcatcccttcgttcagtaaggaatatggagcctctaccttgggccaggcattgtgctgcgcatcgggacacagtggattaaaaattaaaagggtcaagtcaggtgcagtggctcacgcctataatcccaacactttcagaggccaaggcaggcggaccacttaaggtcaggagttcaagaccagcctggccaacatggtgaaaccccgtttaatattttacattaaaatataaaaattagctgggcatagtggcacacgcctgtaatcccagctactctggaggctgaggcaggagaattgcttgaacttgggaggcagaagttacagtgagccgagatcgcaccactacactccaacctaggcaacagagcgagactccgtctcaaaaaaaaaaaaaaaaaaaattaaaagggcccttccttcactgagctgacattccatggaggaggacacgcacttagcaaatattaacacaattaagtattgtggtgattaaatggtgcacagaaaaagtaccaggggctaggaggctgtaaagcaaaggaccttaaactgcaatgggggagagagggcagcctctttcctacaaaccctgctgtttatattgacttaggaaagataagtaggagtcagaggggcaaagaggaaaaaggaagagcctcctggtcattaggagcactgtgtacaaaggtccttaggtgagaaggggcatgacatattcagagaattggaaggtcagtgtggcacgagctcaagaatgaggaagagaatgacccaggataagcctggagggacaggtgacttagatggtgcagaaccatcttgtgggatttggtctttagcctaagagccacaggaaaccgctgaaaggcttatacaagggaatgatgtgatcagattggcattttttaaagagtatccggctgctgcatggaatctggtttgggaggtggcctaaaggaggggactgattggacacagggtataagaggagttcttcagaggagactccagcatatactatgaattgggagatggtgccatgcactgtgacagggagcactgggagaggaacagctttaggggagaaattgggagttgagtttcaggtgtgcatatggaatgtgaggtgcatatgcaacatccaaatgcagccatcaaggggcagtttctgtaaggatctggatttcagagggaagtaggggccagagacatatatttgggcaccattagcttagagatgaccacggctggcagactgaatgagggtacacagagagttccctgccaaactcctgtaactctttaagtcctaactttgtcatcacctttgcagagccatccctgctacttacataaggtaatttactacttctatgttatttatctacatttgtcatatcatatgttaatacatgtttcacctcaattcagtgtgcatccttacaagtgaggtatattttgtgtgcccagttcttggcttaggtcctggcttagtaggctcccagtgaatgttactcacagcgttactcacaaatcaaagtgatgtggcctttgaacctcagagaagcatcctgcagttagtccatgtagtaaatggtgtggcatggtctttttttttttttttttttttttttgagacagagtctcacttgttgcccaggctggagtgcagtggcacaatctcagctcactgcaaccaccacctcccaggttcaggtgattctcctgcctcagcctcctgagtagcaatgactacaggtgcgcaccgccatgcctggctaatttttgtatttttagtagagacagggttttcacatgttggccaggctggtctcgaactcctgacgtcaggtgatccaccctcctcggcctcccaaagtgctgggattacgggcatgagccaccacgcccggccaggtttttaacccttggcaattcatcccagtcattgggaaagtggtacttacttgacacaaatttgctttcttgtactatacacattctataaagaaaataatacttgacttaacagtttttcagtttgaagaagatgctgattcttctgctaatcatgttacaaaaggagactagaatatctccactggatgctgcgggcaaatgtgtgtggtctgtgagaaatgtgttatcaagagctggtaaacattgtcttggcagaaccccacacaggagagagccaggaatgattaaatgaaagaacagcatatgtgacatgatttacacagttgaatcacattccacatgctccccgggctccagaagaatccaacagcaattctcaaatttaccatctgcctctctgctttctgttactcttctggtgaggagccggggagggagggagagatggtaatgttttatgaatgtttgcttggaaccctgagcatgtattctcatcatgtagttctgcagagaacatgagcagaggctagcaatgacctggtggtgagaggtccagtccttaactacacttgggtttaataacagctcatcacttagtctgttgtctataaagcaaattatcaaacattactaattctcagtttccttacctgtaaatggtgaaggtgggtgatgatgttgtagttgggggcaaggggtgtaagatccaatgtgtattccatggggaagctctgagggtgagacatggtgacatttgctaagcatttagcagagttggctgacgtagtaactgttaaatggcatcttgttttggcagtaatgctagaatagtagcggtaaataaggcagggttttgtttggtttagagagaaagagattatttcttttttgctgttctttgtatgtaatgaaaatttgagaaattaatttgatttaaaattttatttgtaaagtggatctctaccttttttaatccacatgaatgaacattctaaatggcactcaagccatggattagggaggcgctttctgagaatgatgattgtagggaaggtgagtggtttctattcttgatctgacctgggttctctaaaatacagcaacatatgtctatatgtaccattattaatggtggaattttttattttagaaacactctttaagagttcaaatatacttaaagttagggcaaataataccagaaactgtatattcaggcacccaaactaaaaataatcatcaagattttgccactgattttcctgtttcataattttctattttaaaacaaattgcagatatcaggtcattttacttctgctttttttttttttggagacagtgtgttgctctgtcacccaggctggagtgcagtggcactgtctcggctcactacaacctccacctccttggttcaagcaattctcctgcctcagccccctgagtagctgggattacaggcatgcaccaccacacccggctaacttttgtatttttagtagagacagggtttcaccatgttggccatgctggtctcgaactcctgagctcaaatgatccacccgccttagcctcccaaagtgttgggattacaggcgtgagccaccacgcctggccgattttacttctgtatacctcaaaatgcctctgtaaattaaactacagacttttttttttaacacagtcacaatcccattctgatgaattttgttttattatgatggagttttaattatttattaaagtctttctttctctcattccctctcccttcctcttttctgctctttctgtactgtgtatgtatagatttatatatttatttttatttataatacctaacatgtgcctctcagttttaaatatacaaaacaaaatttaaacagtggtttcataagtatgctgataccagtaatgatttggagttaacatggttttgggaaaaaggcatggttggaaaaacagaaaaaaaaaatacccttgtctgaccaagtttgcccctatttggcccattcccatctagcgctgaattaaagatacctcctgatgagctgggtagggacagagaacttggtgggtgaaataggtagagaagccctaacaaaaactgcagcctttaccgtgtgaacctcattgtcaacatctgctttctaatacaaaaaaatatgttcccttcaccccagtgcccttcctagaaaattttagtaatccttagtaatctaaagatatttagtattctatgctataaattggaatttgaaacttgacttattggaatgtttttaaattctaggatgatgtcttaagaaactccctggctatataaataatcataattattaattgtacaattatcctttaaaccaaaccaaaaatattttcaagtttaggagagttcaaaagctatttaatataaagcagaacttttggaaagaaaaaataagcattgtatttgctaaaatgccatcacgggttctctgttgtctgttctgatgatctgttcactaaacctgcctcaactctgaggagttgctacttttttgactggtattgttggagggtggtgggatctgttgccatgggagaaagaaaagaagaaaaaggaaaagaacaaaaactgacatctggttgatgaaaccttttgcccccaacagttctgccacagaaagggatgaatggctagaagcgatttccagggcaatagaagagtatgccaagaaaagaatcaccttctgtcctagtaggagtcttgatgaggtattgttttctccttttttttttttttccagtgcatttcaaagtttttaccttaaacatttcacaggggtttaagaaagcaacatgtgtttcagaaaatgattggactggacatcagagagttactctacagattaatgtctcatttcagcgctaaaagtttatcctcctattgttgtctcactgcaagtctgtgatagcatatagcatattcatgtttcttcccagctataaaacttcattgtaggaaatttagaaaatacgaaacagtttaaggcagaaactaatcagctgccatcccactaccacaggcgtctttttaagttaattttgtattagaaaatttttagattgtagctaaacttagtattccgagcacgtgaaaaatataatagcccatatttcttttctttttctttcttttttttttttgagacagaatttcactcttattgcccaggctggagtgcaatggcgcaaactcagctcactgcaacctctgcctcctgggttcaagtggttctcctgcctcagcctccctagcagctgggattacaggcatgcaccaccacgcccagctaattttgtatttttagtacagatggggtttcaccatgttggccaagcaggtctcaaactcctgacctctggttttccgcctgcctcggccttccaaagtgctgagattacaggcatgagccactgtgcctggccaatagcccatatttcttttttttttttgttgagatggagtattgctctgtcgccaggctggagtgcagtggtgcaatctcggctcactgcaacctctgcctcccagatttaagtgattctcctgcctcagcctcccaagtagctgggactacaggcacgtgccaccatgaccagctaatttttgtatttttttttttttttgagacagagttttgctcttattgcccaggctagagtgcaatggcacaatctcggctcaccacaacctccgcctcccaggttcaagcaattctcctgcttcagtctcctgagtagctgggattacaggcatgcgccaccatgctaattgtcgttatttttagtagagacagggtttctccatgttggtcaggctggtcttgaactcccaatcttaggtgatccacccgcctcggcctcccaaagtgctggtattacaggcgtgagccaccgcgcctggcaatttttgtatttttagtagagacaggttttcaccatgttgaccaggatggtcttcatctcctgaccttgtgatctgcccaccttggcctctcaaagtgctgggactacaggcgtgagccaccatgcccagccaatggcccatattttatccccatcttttttgtttgtttgttttttgagacggagtcccactctgttgcccaggctggagtgcagtgggacaatctcagctcattgcaacctccacctcccaggttcaagtaattctcctgcctcagcctcctgagtagctgggatcacaggcacccgccaccacacccggctaatttttgtatttttagtagaaacagggtttcactgtgttggccaggctggtcgcaaactccgtacctcatgtgatccactcgactcggcctcccaaaatgctgggattacaggcgtgagctgctgtgcctgaccctcatccccatcttggtagtgtgagatgccactgccgaataaaaaggcaggcagtgtgcatggagataatcagaagttgttcttcttccacaggcagactcagaaaataaagaagaagttagtcctcttggatcgaaggctcccatctggattcctgataccagagccacaatgtgtatgatctgcacaagcgaattcactctcacctggagacgacaccactgccgggcctgtggaaaggttggcgatgataacacccatctccattgtggtctttactgtctccaggctgtacatagtgaggaagcatatttcccctcataaaccattatagttcaagaataacaataactattattattattatgttaatggtagcaaacatgaatggtgttttctctaaatatttagggggcaggggcaatcttcttagtgaacttccaccctcctacttcagagttacattagaacatcagtaataactgattcaaaaacaaaatctaacaaatccacaattaaacaggccctcacatttacagctattatttaaactgcatctctctagtactaagtatccatagtattcagtacggggaatgttcagtgttgaagttatctctagtgatgtttctaagccttcatgatctcattagtaaaatgggtgtagaaacagtgacatcagagagtcactctaaaaattaaatgaggttgtatttagagagcatttagtatggagcccaaaaacttggtagagttgcagagacgtggtcgttgctgcagcagtgattatgatgatgacagtgctggtgatcagtatacctcacaggcctttttgcatgccaggtacggttctaagcattttgcatatattaactgctttactttattattttatgtagtcagccctctgtaagtaatcatctgtggccccttcatctttcaagtgtggtactatgcattagttcactatatgcctgaactccagagttattattgagacgaagtgagactcagtgactctgaaactgttttgaaaagtggatagcactgtaaattgtaacatactttatggtgtagaaacacaagttattctaatgaaattaatgacataattccaatgtgttttcagattgtatgccaagcttgttcgtctaataagtatggcttagattacctgaaaaatcaaccagcaagagtatgtgaacattgtttccaagaactgcagaaattaggtaatatataagtaaggatttaaccaaaaattcctttattccccagatgctttcaaacaaccttctgagagaaacaccttcggtacattagcaatatgattgttgatacttatctccaaatttgtagtaagctttcttaattcatattttgttgtaattctgggagaggttgggctgaaatttggtttcagtctgtgtaaaaggttttgctaagaaaactgtagaaatgtaattacagggtaaaacacttaaaacagtaaaagggaactttaactttcaagtaattttgaagtctatagtttcacatgatagtgtgctcattacaaatcattttatctatatgtaaagtaattctctttacttaggtggcacttcgttagcttaattctagtcagttaatctgatttagtgagatgttaatgtacatctgaatgtgcagctttttgaccgaacacaaaaatgatacttcctatttccctgctcattatttgcaggtatcctccagtaaaatgaatgcagcttagcaggactgctcaggtctatgttttgggaagagatttttagttaaattcctgaaacctgtaggatctaaattttatttatatatattttttgagatggggtcttgcactgttgcccaagctggagtgcagtgacacaatatgcaacctctgcctctcgggttcaagcgattctcgtacctcagcctcctgagtagctgggattacgggcacgcgtgaccacgccaggctaatttttgtattttagtagagacgcggggcggtctcaccatgttggccaagctggtctcgaacccctgacctcaaatgatccacccgcctcagcctcccaaagtgctgggattacaggcataaggcaccacgcctggccaggatctaaatttttgaaagtctgttcttcatttccctgaaggatagcttttcattagcaaggaggaatttctaagtggatgacatggtatttcagagtccacatatttctagatgaataatttattattatttgtgtacattttccaagaagacccatccatctcttcctttatgttcctctctttagtctgggtatatggtataagctgcaaacattcaaaattcgtctttgaattctccttcctcatcacctatacccatttggtcagtaactcttgtcaattttatcatcaaaaatctttgtcttgatttctccatcccagccctaataaggccttcgttatctctcatctagacaactataataatttcctaacaagttttcttgctgttagtcctttctccttagtactgccagatataatctatttttccaaatttaatctgctcatgtcactccccagcctaaaacatataaacaacagtccagtttgcttcaaaccagccccttttttttaatctggcctcattattctccagatagatgatttaatttcatacctctctgcctttgctcatgctgacctcttagcgcacagtgttcctcctgcttgttttaacctggcaaattcctacttactccatcatggccagcttttatcttattatcttctcagctttccctgaaccctctgcaatcagaattcattacttcttcatccgtgtccgatagcccccttttttaagctgctttgttcattgtagctggtctagtatctagacacttaacaataccagggttctttggggtttacggcagtagggaaggttttttggattttttttaagttggtagtatagtcacgtgtttcataattctaaaggcacacaagagtaatcctttcacataaagttcaaaaagtataaaaccatagatagtagaaagtcttcctgccactcaactcccagccatccattgtccttttccaggagttatcaatgttgtttcttagtgtccttccatggatattttatgcaacagtgtttatggatttgaatgaaattgaattgcaaaatgctgagcattgcctacataagcatgcctgatttgttctagatcaccagcactcccctaggattggatctcctggaaatcacaaatctccttcaagtgccttatcatcagtcttacatagcattccatcagggaggaaacagaaaaaaatcccagctgctctcaaagaagtaagtgtttccattaaatttgcaatgtgatagaggctgaattattcatatgcatataatacaccgtttttctttcataaaggaagatgtcatttcccacaactattaagtcatgaattttaatactgatgatggatgtggctgatgcctcacaatcttgcttggtctcccgtctgacctaagtcatttagaaaatggctattgaaaggtttagagaacatttaatagcagtgatagaaagtaaagataagttggacacacatgaattttttaaaatgactttgagcaagatccttgccagagggaagaagtccacaggatattttgggcattttgttagcatttagtgatctgcacggtttatttgtaggcattggttggttatgcacagctgatatcactgatagtaggttgtctttcctttaaacttcctttaaaagaaaactttaaatagtgataatagcctgtatgcttagacctgctaatggtgtaatccacagactttgttgatatcctatcccatttcctcaaatttagatgtcaaagaacaaacagcattgccattttggctactccgttatgatcagtttattagtgaggtccgcctgtgctagttttgtggccagcagagtagtttttaatttggttctcttgcttttttactgaggaggtgttctagcatacatagtggaaggaaagaactctaaaaatttgatcaagatcatgtttcttatgtaaagttacgagtatattcccagttgaaacacagtgttttagaggttcatggaaattacagcacgtatccatacttcgtttcttgttatgtctgaataatatttcattgtttgtgtataccacagtttatccacccatctcttgttgaatattgggttgtttccaccttttggctattacgaattatgctgacagaaatattcatgtgcaaatttctgtgtggacatatgttttcatttatcttgggtttatacccagaagtagaattgcttgctcatatggtaattctatgtttaactttttgaggaactgggaagttgtgttcttattctagtaatgtttaaaatatttttagaaactcctctttttagaattacatttagagcctcagtactctcagtaatggcagactacagcttttgagttggagttggattatttttttttaattttcattgcttctggggtacctgtgggttttggttacatggatgagttgtataatggtaaagtctaagattttagtgcacccatcacctgagcagtatacagtgtacccaaaatgtagttttatagtccctcacccccacaaccctgatttattttgtaaataatcaaatcattggaagacatgttttgtggatcagttaggtgattaagttggtgaacaccagttttatctttgaaaatataggtctagtcatggctattcagtattatggttgatcttcttgtgtggctactaaactggtcctaaattggtataaaggagaaatgtaatatattttgagcaacattaataacaacttagataagaatatagtaggattccaatgtaactatattttaagcaaaatctcatttgaatgttaaacattctagttggatttttttcctcttttttttcactgagataggaaacaattctagttttttaaaaaattacttggtagtctttataaggatgtatttatataaacctactgttgcttaacaaatatttctaatttaatgttagatcttaaatttcccactaaacaatatataattattttcatgaaatttataagaaattaatataattaaagatacactttaaaaattcacagagcgcatgtgtattagttttccatttctgcataataaattaccacaaacttagcagcttaaaacaacatacatttattatctccagagtccaggcatgggttagctgggactctgcagggctataatcaaagttttggcaagtactgagttctcatctagaggctcatctgggaattcatttccttgtacttgcaagactgggggccttgccttcttactagcttttggctggaggtcctcagctccttgccatgtggacctctcaacattgctactttgttcaaagccagcaaggaagaaagtttctagagtgtctcctaacaagacagggccatatataaggtagcttgatcatgggagtgacatcctatcaccctcaccaaattcttagttagaagcaagtcgtaggtcctgtccacactcagggggaggagaatgtacagcagtgtgactctctacagcaagggtcatgggaagccaccttaagcgtgtgcctgccataccattactaaggtagatcctaaacattttgttatttatctactcctacatttttaagaacacagcttttaataaccattattagagtcaataggccaggcacgatagctcatacctgtaatcccagcactttgggaggccaaggcaggcaaatcaacaccaacctggccaacatggcgaaaccctgtctcgactaaaaatacaaaaattagctggacatggtggtgcacgcctgtaatcccagctactcgggaggctggggcacgagaagtgcttggacccaagaggcagaggttgcagcgagctgagattgtgccactgcactccagcctgggtgacagagtgagactgtcttaaaaaaaaaaaaaaaaaaaaaaaggccggtgtggtggctcacgcctgtaatcccagcactttgggaggccaaggcgggtggatcacaaggtcgggagatggagaccatcctggctaacatgatgaaaccccatctctactaaaaatatacaaaaaaaaaaaatagccggacgtggtggcaggcgcctgtagtcccagctactcgggaggctgaggcaggagaatggcgtgaacctgggaggtggagcttgcagtgagctgagatcgggccactgcactccagcctgggtgacagagcaagactcagtctcaaaaaaaaaaaaaaaaaaaaagaaaaaaaaaatcaatcagtaaaagcttactgtctttttgcatagagatgaaaacattttcaactttttatgaagtaaaaattagcctcttttctttcttactataatttgggaagcaaagattgattcttaaaatgagcttccttaatagtagaattttctgtttattattctgtttgtatggtttttagaagtccaaaaagttttttaggaacagaattaaaggttcaaataattttccctgatgccccaaaataagagcaataaaaaacaaatccccaagtccccaaatccagcttttagaaaagcattttagtcttctggaactatttttcttcacctgccaacccagaaaacacagatgaacccaccaagaaacatacgcaaacacgtgcaggcacagttaaaccaagtaaaattctataattgcctctaacatggttgtcttcttttttgtgctcatgttaatagcagagttcaatttgtatagtagcactttgaaaatatatttcattctgaaacattctatcattacagttattgctttcagcacctattggttgcaaataattttgctgttataatttgtctgaaaaccattaaactttgtatggggtttcttatctaggtatcagcaaacacagaggattcttctatgagtggctacttgtacagatcaaagggcaataaaaaaccctggaaacacttttggtttgtcataaaaaataaagtactatatacatatgctgcaagtgaggtaagatctgaaatctaaagatgagtaatttggggttttgtaatgccaactgcaagtaattacaatattttaaaaatccatttattttacataagattttttgctttgcttttggatgggggaggtgttgttgctgttatttttaatgtgaacagtgttcttgctttgtacctggagagctctttctcaaatgtgttaggaattttccatattattaaaatgcaatttttgtgtgtgtcgtgtgactactaattactttactaaaggcagagctgcccccaggtgcactggctcacacctgtaatcccagcactttgggaggctgagtgggggtggatcacctgaggtcaggagttcgagactagcctggccaacatggcgaaaccccgtctctactaagaatacaaatattagtggagtgcctgtaatcccagacacttgggagggtgaagcaggagaattgcttgaacccgggaggcagaggttgcagtgagctgagatcgtgccactgcactccagcctgggcaacagagagactctgtctcaaaaaaaaaaaaaaaaaaaaaggcagagctgtgtttctttctgccaagctctcttgagtgatactccctttactgtcatcgttagattgcattgatctgacagcagcatagataagataggcttttttggattataaacaattctagcagtttactctaattctgtccttttctcctacctgatcaccctgtgttccaccatcctatgaaaacactgctgtagggtccacacttttccttagtgagatccaggtgaatagcttacctttctgagctgttttctgcatccataaaatgaaagtaatataatcacgtgccttccttggtttagtgaggatgttgtgaaattcagtagatgtgaacatgccagaaattgtgtgccacagtgcctggcatatagggtacctagggagggagtggctcaatgaatattattgaataaatgagaagtgagtaagttgttagaattatcattaccttatatgtgaataattgaaattaaattagagctatgtagatcaagagttttcaaatctgaattttgtctcaatctaaaaacttttctccatttgtatgtttttaaattaggacgtggccgctttggagagtcagcctttattaggattcactgttattcaagttaaagatgagaattccgagtctaaagtatttcagttactgcacaaaaacatgttattttatgtattcaaagcagaggatgctcattcggctcagaagtaagtaatctggccatatttttcttttattcatgagatttcagttttttaatggttgcttgtaaaatgacctactttaaggcatggggacaactcaaaatttacatcagagattttaattagaaagatttaacgtattatttaaactcttcagaattgttttaaagacaaggcaggggtatctggaatattttcaggaggcagaggggaaaagaaaataggtagtcctatacaaagtattttatctacacgtgatctcagaggaagcagcgtgatgctgctctgctgaaaggaaggaaagctaaggcatttgacctctccttctatgagggtaagaatcttcccttgaaacattccaggactttggcaatccagcgattcatttgtgccatggaacagcaggagtttaaacagctgctcgctaacttctttggggaaaaggtcaaacacattaagagactcccatgctgttccagtgactgagtagaaggaaatggctatcagtttagatggcaaaggctgaaacagtctcctcagaattccagcaagaatctttacttagatgttatcagtttgcttaacatagagatgcgtatctacctctgtgaaattaggtctcttttgaacaaaatagttcatcatctctcatttgatttttaccttggcttcacaaaagaatacatttttgttttcaggaagaggtgttcatgtgttctccacaagcttaaaagtgcatgaaaataaaaaagaatgctttgagtgagcaaagcttttagtttcttaagacagttaagattaatgtaccagaattgcacacatccctgaataccagccaggcacaatgttacacacactctgtaagactcttttttcagtctattttaggatatccaacagtatatagctattcttccaaatattttcctttggctactggagaatatttttaaattatgtcacttaaccatcttttctataaaaattatttagacaaaatagtaattgccctaatattgtcagatattagctttcttacaattttcatcaaactgaaaaaaagtactgcttttcaatatatgtcatcttttgcttatatcattgagttgacaagatagaaatgccaccaagacagaattacatgtagttaggtaaaggaagtcagtttacttataatttagaattgacccaggctaaattataaatttctctttattaatatcatatggattgctttttgaagtacatgacagaatattaaaatgtattaattttagtgggaaaaaagccttgctatggcagtataacatgctatttatgttcaatattaaatttttgaaaattccttaaaatttgaactgaatctgttataggttgcttttacaaaataattaaactgagtgatttcaagtgttcatagttctctggactctcttctgtgtgtgtgtgtgtgtgtgtgtatgtgtgtgtatatatatatatatatatttttttttttttttttttttttttttttaatggagacagagtctagcaatgttgcccaggctggtctgaaactcctgggctcaagcagtccacctatctcagcctctcaaagtgctggaattacaggtgtgagccaccatgcccagcctacataaaataataccgtaagaaatgatatttccataagaaagaagaaaaagttcagaagcaattacattagtagggaggaaaaagactactctcaagtatcttctgaataattgcagctgtgtatattgtcagataaaactttgagactaaagaattttggaaagatgtctgtgaaactttgagaagctctttttttttttttttttttgagacagtctcgctctgttgcccaggctggagttcagtggcgcagtctcagctcactgcaacctctgcctcctgggttcaagcaattctcctgcctcagcctcccaagtagctgggattacaggcgcacaccaccacgcccagctaatttttgtattttagtagagacagggtttcaccatattggccaggctggtctcgaacttctgacctcaggtgatctgcccaactcagcctcccaaagtactgggattacaggcatgagccacggcgcccagccgagaagctctcatacagcatgcaaacttttgatcaacactagatgccagattccttttaattgcaaatcttgaaacaggtctggattaggggatatacaaggaaactctgatagctagagttaaggtaggaggagacagggaactagtgttcctaaaagcactgagtccaaattccagataaaaaagaagttgtaataaagccttcactgaaatatcaacttccaaaataaattaattggtagcatcaagacttcatagaacctttatacatgaaatggtcccttccttatgcctatcagaaatgagaggcacactttccaggctaaattttggaccaaattaccaaataaagggtagttccatgtatgcagaaggccaatttgctgcaagaaaagatcttactggccggtcacggtggctcacgcctgtaatcccaacactttgggaggccgaggcaggccgatcacatgaggtcgggagtccaagaccagcctgaccaacatggaaaaaccccgtctctactaaaaatacaaaattagccaggtgtggtggcacatgcctgtaattcgagctacttgggaggaatcgcttgaacccaggaagcagagattgtggtgagccgagatagcactattgcactccagcctgagcaacgagagcaaaactctgtctcaaaaaaaaaaaaaaaatacatatatatatatatcttacctatgttgttatggtaatgaggaccacaggcccagctgtcatctatatggtgttcacacgtcagatgattaggttttacaaatctaaccgatttctcttatcaataggtggatagaagcatttcaggaaggcacaatattgtagcagtattggtttcatctcttctgtgattccaaagaggtggaatttcatcagaatggagtaaatgcaattcaaaaattgtataaaaatgaacactgccaagataaagccaaccagacccttcatcaaagaaattgttttgttaggtataagcaatttttaaaaggtgtttgttttttcatttatgttatttattaaaattttgatgtttacttaatggtcagaattatttctgagacacactgaattctaaagtaccatttctttagagaccagaaaaactatcttaatactgtatactgtattaactattcgtgacatagttcacactgttttcttaccttacattgtaacaatcttactggtggaaagtctttgtaaggaaaaaacacatagcaaggagcaaatttccacaaagtgcttggtttaggaattgtgattattataaaactgctgatgaaaaaaatgcatgtctttgaatcaataaacttgggtgaatatttgtatcttttagtggaaaaacatggccagcttctacctcagtaactgtgaactgaaatttcagtaaattatctaaagtatttctgttgttaggtacctctttggcaggagttaatattacatcatcaaagaattatagcaaagagatagaatctgaattttttaaaactgtgagtaggaatgaagatgtttttatttgcagaataccacaaataaccaactcttccggcttttaagtccaatcttttaaaaaatctaccacttcgaaacaaacataaatgtatcattttttaaaatagcaaaatatagcaagcattatgtcacataatattccctgctattataagagttctgagcccaagtcaatgatgatatttgtatctataagtaatgttacatttccaaaaatattgtgcattacaaatggaactggaattactatatcagaaaagcataattataagccagtaataactgaaattctatagtattcattttcaaaaggtctttttctgccagtttgtgatatcctccctcctaattaaaaaaaaaaacaacaaatcctttctctataagcagctatcagcacacctccttaggaaagatttagattcataattctggtgcacttactgtttaacatatgaactaccttgcacatacaattgttgattagcagaagaaaatgaaataacactgtgataaaagccatccctgatgttcacaatacacaatttattaactaagtttaaactataaattatcttaactgccatgagcggtggctcacacctacaatctcagcattttgggaggccgaggccgttggaccacctgaggtcaggagatcgagaccagcctggccaatatggtgaaaccccatctctattaaaaatacaagaattagccggtcgtggtggtacatggctgtagtcctagctattcagcaggctgaggcaggagcatcgcttgaacccaggaggcagaggttgcagtgagccgagatggtgccactgcactccagcctgggatgacagagcgagactccatctcaaaaaaaaaaaaaaaaaaaaaattgaacagcaaggttatccatataatatttctttaaagggtacaagaattttcctttctgcctctaaataaaggatttcctaattcagtgtgatccttaacagcaaccatgaggattactgagtgcctttctggggccttttgaatgctgtttggtacagcaccagagtccctactagatctagagttggctgctatagttttttgtggcgattttttgccatggagtcatttgaacctcatacacaatcctaacatgccatcccctttctgtcatagcaggtacactaaaatttctttgtagctcaattttatataatcaagatcacataaataaggcttccatgttagaatcgttgcagtttttagtgtattcctttttggaggctaaagttgtaccttataaactgtttctgcgtctggcatttagcaagacaagttatttgggttttctttccctcctcttgagctctcagccttctgactacaaggtttggcttaagccttataatctaaaaaatatcagccaggctattctatcttctaagacctggctgaatcatgagccagttctaaatctaaagagagtgagagagggaagaaatctggcacaaacttacagtctctttaattacatgtaaaatgcatgtgactgtattacctattggcttagccccatggagggtttagaaaaatgtgtagtctttgtggaagctatccaattatccttctcccaaaaagatgttttaaatgtggaatagtattacattcccctgcccctttatgagtccttcataacttactaaagctgaccaattgttatttatgtaacctggctcattcattgtcaactaagaacctaattatatgcaatttattgtaaaaaaagctataaaaatatattttgctagtattttagaggaaaaatgatattgggcacagtctataaatggggagaaaagttaagtagtatctagattccaaggatactatatttattatacagatatgtgtgcctgtgcttccatcaaaccctttttcaggtatctccttttaattcataaggaggaaagagtagggcatttataaagctaagctaaaaatgatgctaagcataacgtagatgagacgccaggctgaaccaggggaaggctggcattgttagtgtccccaactagcagtccacctttatctgtggcagctataaatgtacaggacccatcagagtcctaagaaaatgagagtaattatctctggcatcatccacatttccgactctttccaatctcttttccctttttctgtaatgtacccagcatccccctattgtattttggttgcccaagattcttgattctttgagtgtgtagtagcatttcttaaaatgagatcatcagaccaacccttgattcacatgaaagctgtaatgacacaacaaagagaaggcgacagttttaaagtataattgtcagccaaatgtgtattttatatttggttcatagaatatatctagatgtggggaaagtctcctatttggtaatttagttaaaatgtaaatgttatatcacagcatatgttggtatgttttggagtgtgcttccattgtgctcagcttttgaaaagtttgaaatccactttagtcaaatgtagtcaatgggatttccagagatacatattgtttttcttagtgtaccacacactccttgaaggcagatactgtacttaatatatcactgtcttccataatactgccctaggtctttttagtttttaagagaccgggtctcgctatgtttcccatgctgaactcaaatgcctgggcttaagcaatcctcccacctcagcctctggagtagctgggactacaggggcatgcaccaccaggcctggcttcctaggagggtctttaaagagaaaatatttgttcaattgaaaacaggattcttgtcatctacaactccaacacagcctgaaaatatccacattataacctggaccttagacctactttctccactatcctgcaaagctacatctgtaactacctattggctatctatatgagtcctcaagcatctcagactttacatgaataaaactcaacttccttcccattcaaatctgtttattttcttctgtaagagaaagataccatttgagactccagaatctgcctctaactctcaacaagactctgcaattactcaagtatcctttccatcctcattgccctgctgttattacataggccctggttcaagtccttgttacttgttcccattattgcaataacttctaattccaatgccgttgtgtgatcccattttaaacacggccagagcagtcttccaacaacatagctctaatctagtttcatccccacttttacatgcctcagtggctttcccagtgacttggcatggaacacgtcctcagttgccatacattccagctaactcttacccaacctttctttgttcacacagtttccttttccttcctcattgacccatccgcatctctgtttatccaagacttctctgtgatagctgacccttagtctttctctcccctattcctccagactagatcctgtctccttcctgcagccccgacacagccttcagttcatatcttttgcatgatgcttagcaccttctatccctaaggacaacttactcatttgagatttctggcagggtaccttgcatgcagtggacactcagtatttgctgaattaaattccttcctatggatcccttctgattttttttaagtgcctctaatacacatatcattctagggctcatgccacttttaatgtcattttctaaaggaaaatcttatctatgatattttcccttataagagatagttgttttgagtagggttttttaaaagataaaggtagtaggaaattttttaaagcctaaatatcaaattcctttccctttggagttgggggaaggaatgaagggggagcaacttgctctttcatatgagttggtcatagcatgtaagaaccaatcttgaaatatcgttttttttttaatggcttataatgtatttctagaaatactttgtacttaaaatgataacagtttgtatctttttgtccatatatactttataaataaaaaaattagcattgtaaataatgttaatatgtatttatacaaaataaatttactataatata

SEQ ID NO: 469 - DNA, 9560 bp, Homo sapiens
  source 1..9560: mol_type = genomic DNA; note = NC_000011.10:c4608231-4598672 TRIM68 [organism=Homo sapiens] [GeneID=55128] [chromosome=11]
agagccgggtgtagtattctgggagctgcgggctactgggcctgcgctgccgggctttgggttctgggcctctgccgctctctggccctaagtgctgagctgccgggaacggcagcttctgacgctgggccattggacgctgcggaaccaggcttcttcactttgagtttccgccgcgaagcgccagtccgggccgaggagggaggtgggtagataactctgccttttctgaagtcagatcccgcacgctcactttacccccacccgcccgctgtcctggggacctgcccaacgccctgtggccaggccaggagctgctccctgactccggaggttaccgcccgcccctcgactcccttcccgctggggtcctaactggaagtcttccaggccccgcccccttctcaaatgcccttctcagactctcgctgtaccctacggaaggcacagtcaaagcaaccgaacgtttaattatttgaattttctcaaagtaattcatgtataataaaaagtcaaacattaaagcaggtcttattttgaagagcagtaactacccatccccagatctttgcagaggctgccacttttagtttgtccccatttagatgtttttagcaccctaaatcaaaataatatgcgttccactgtatttctggatttatcattttgatatttctttgccttactttcttactgccacaatcttgtcaattttccatcgctattttaggtcttccatttgtagctttaaataatgggtatcaacttccatttattgttttattgactttagatggtgtctcttaatgtctctactgacttagctaaggatattaacacatcctccactttcaatctactatcggttggaactcaacatttacatttagttttcacgtattcaacaagtatttgaggcactgttcttggcactggggaaatagaaatggacaaaacagacaatgaccctatccacatgaaaaagttctagtatgggaagtaagacaatagacgaatacatggcaaatgacgtcaaaggcaggatcatgtagaagtcattttcagctgggagaatagcaggcacccaagtcaggtagattgaatggacgaggggtttgcgggagtgtgtggaagtttattcctttgcctagctgggcacaggtgctgtttcaaggagagatcttgttaaccgggagccaggatagattatttagtaagttagtgatttaccaaaatgaggttttaggatactggatcccacagtttggtagtgatagtgggaggaagaaaagcaggaggcagggagtctagtgagaaggcatgccctgccaatggcatatcagagtcctgcaagatttactgctctgcttcctgcttcctgctactggactgcgctaaaccacagtgatttttctctcctcttgaatttgtattataccttaaagctaaagaggttaagaaatttgcccaagatagatggcagagccccaagccaaacatctgtaaaatgagaacaataatggcctctgcctagggttgtgaaataaaccaacttaattcatgtaaagtgctcagaacagtgcctggcacatcatagaactgctcaaagagtgcttgcttttattattaatgtatgctctcaatttacctcacaaatgctaaaaggattttgggtttaggaactatttcctatgtctagctggttaattcattcaacaaatatttactcagcaatatctgcattgcaggtgctgtttaggtgctgaggatacaacaggaactaggatcaacatgtcccttccttgtatagattctagctggtaacacaaactagcaaagtgaatgaataaatattgccaactgagccaagagcctgccattgaccaagttccatgcccatatgtggccctggcaaaaatctcagatttcttgctggtgtagtgatttcatcaatatgggtgtgatgatcatcaaatgatctttgttttaatctccaagggatgttatttcatctctgcttctagcatatcactaaaagctcagaagactaccttgacatcttggtgaataataagtacattagtgctggagcagtgggcaggggtttaaaaggcacaggaaaagaactgctgtttcctttacagtttttgcattttagtgtgcaacacaagaaaacaaattgagcttgtaggcaatgggcttctggcatactaccttttgacactttgaattatattaatgtaaatataaacataccagagagtgaggctggaggtatttatggccttacttcagatactgaaataccacattttatgtgaacttacccaagtttaagagaaataatgctgatttgtagagcatgattggagtggtaatggtcaagtagagcaaacccagaggaaaatcagagttgaccaagtgaatgaaaaccgaggactcccaatattcactcacttaggcatccccattatccccttcatggtatgagtaatgtggcccgttcagaccatgcacccttcagttggaaaggccaatgcttattaaagaaggtcagtaaagggtcaaaaggaaggtggttttcccccagaaattaattattcctgttactgatctctctgttcctctgttacctttttctcttatttgtctttcttttcttcttctcagcctttactacttctccctggtttcattcatgttctgaggagggtgtgagaaggaaccatggatcccacagccttggtggaagccattgtggaagaagtggcctgtcccatctgtatgaccttcctgagggagcccatgagcattgactgtggccacagcttctgccacagctgtctctctggactctgggagatcccaggagaatcccagaactggggttacacctgtcccctctgtcgagctcctgtccagccaaggaacctgcggcctaattggcagctggccaatgttgtagaaaaagtccgtctgctaaggctacatccaggaatggggctgaagggtgacctgtgtgagcgccatggggaaaagctgaagatgttctgcaaagaggatgtcttgataatgtgtgaggcctgcagccagtccccagagcatgaggcccacagtgttgtgccaatggaggatgttgcctgggagtacaaggtgagagatggaagctggccactccagtctaaccccggccccaagttggctgtttctagatcaagggcttgaccaccagcaccacagactgagagctaactcctttggttcctgacacccagagatccctggaatctgatacagagagctatacctttccttgtattcatgaccttccttgatttcctgctctcccacttcctctacacctacatcctaacagggctcaattcctaacccaaggctgatttcagtaatgagaatgtgaaggaaaacagtttgggttttaactgagattctggatgccttggatgagtttaggcatgaggctcttatatagatggtcaaggctacacctgacctgcaaactcctcctagcagtgctgcaagtagtcatttggcattgaatggatcacttccctccttcattttatagacaaaagtgaggcttagaaagttgaaaacatggcaatttattttagaggtggaaagaactatgggtgagtcacaagattgagagaggtcatctgatatagtcttctcaggtcctttctgacttcaggtccagttagtgaaaggaagatcagaggctgtgactcaagtcttcttgcactttctcctctcccaagtttgtttgtttgacaagtcatctctgacaaacctgggactccttttttgtagctaacctcatcaacttccagcttctgggcttctctttactctttcatcagatgcccataatgacatctttatcggaaccattatctcagtgattctgtgatccagtgatccagcattggtctcaactctcttttttggagttgaaataggaaggtgagagtgtaagacaaatcccctgaattagcttttttcctatatgggagggatttctaaaatatgaaaagtatttactaactcattctgtttttgagactattagaaaagggagctagtataacataggggtaaagggctggatgaaatcccagcccaaccatttattacctgaatgactttgggtaggtcaccctctaagcctcagttttcttgtctataaaataaggttaataccagcctcagaggattgtaagtatcacatgcatatttagagctgaaaatatacctgacacttgatatattttaacaaaatagttgctattttgttaaaatagcagaattaaatggtgtttctgcacagtttatgcttttcagtagaaatcccttgcattactattctaggaaagtgcttcttacccttaataagcatatgaaccacctgggagatccatctaaaattgagattctcatttggtaggtctaaagtaaggccaagattctgcatttctaacaagctcctaggtgatgtggatgctgctgatccacttgaaccacatttggagtaacaaggttctggcagacagtaagataaaaataaataagataaggataaaaattggcatggaaaggaaagtccaaggtacttttgtggagaggttgtaaatggaccttttcttccagtttacagacatttagagactgtgggagttgaaatgattctcagcccagagagctacctcggatgtcatctgggcagagtctgcttcctctgtggcattccctttccccacagccttcactgtggccggttgcctgaaggactctggttctcccatagcctcccagtgctaggaagcctaggctgccggaggtggcctcatgagggttttgtctcttgcagtgggaacttcatgaggccctcgaacatctgaagaaagagcaagaagaggcctggaagcttgaagttggtgaaaggaaacgaactgccacctggaaggcaggttgcctcgtggggaaaggagtttgtgtcagtcgtcctgtgtggtcctggagctggcctagggtagcattctcatcactgtgaggcagaatgtgaggcttgaaatcacagagcctagggttctaatccctgctttctctgtcccaggccttaggtaggccacgtcacctcttaattccagtttctccatggggatgtagggataacctctggtcttgtatcctcctatatgagaaaggaaaagcacatgctcacgtgtgtcagctcacagtggcatggcttatatcatgcttgtaaagcagagtttctctttcattttcccaagttagagaatatttgctaagagtctggttattaaaatattgtaaaatcacctctgaaataaatttgaggccagtaagtatcaaactactagaacttttgatcaacagaaagtaacactgaaccaatctaaaacagcatgttgaacagatataatatcaacatgaaaatgaaccacctaacagtgtagttaagttacactgccttagagacttaaatgtaacacatcttgtcattattctgaaaatggaaaatagtctagagcatgtagtattaagataatatcctggaccctactggagtcaataagagtgacaatagagacctagaagcatgtggtggagctgggagaacaggaagctaggaaaaatagtatcctttatctttgcccctgcatagcctgtcacgtggttggtaccattgcagagtatgtgtgtatgcatatgtcagtatgctcgatactgggtgactgaaagtatcagtgctgatttccatcttggctccacagatacaggtggaaacccgaaaacagagtattgtatgggagtttgaaaaataccagcgattactagagaaaaagcagccaccacatcggcagctgggggcagaggtagcagcagctctggccagcctacagcgggaggcagcggagaccatgcagaaactggagttgaaccatagcgagctcatccagcagagccaggtcctgtggaggatgattgcagagttgaaagagaggtcgcagaggcctgtccgctggatgttgcaggtgagtagtaggttttcctggtaaccctgagtgacagctgaagatagactgagactccaggagagagcatcagttacccttcagtagggactgccagccctctgccagctggtcatggatcctgtgtttccccagctaatacctgctgtttccctatccctggctggtggatgacctggtctgttgtagcatcataggtggggcagtgctcaggcagctctggcgtcattccaggccctctcctctagcccgagagtcttgagatggagcctgaaattggccagttcagccaaagctcagcctgctcttccatccttccataggcttctccttacctctgcatggcatctctccattcttggtatctgtctcccttcccctagagaaactccctgccagttcgatgtctgttccctctgaggaatagcacttactcagatgctgcatttttttttctccttccaggatattcaggaagtgttaaacaggtatgttctcacccttggagcctctaagcagccctgtaggggatagtgaggcctaactagagccagaagtagggacggagcacagactcggtgcacacagaaaagcaggtgctggtccacagtctcgtcccacttacatggtaatggctaaggaatctttgttgatctttcctttttcttctttgtacttgatcaaatgtatatcaagtgaagctgtaaaatatgtggtttcaagtagattgctcaaagaggataaaagactgcccatgactccttcatgtccgacagaaaatgtgtgcacttcttcctctcccagaatcaaatatacatccaacccttcccatagcatgggcatgcaggtgttctcacctctgcacacaaacagcttgaggctcagccaaataaccgtaaccatcatgtctctgctttgctggggttcactatgtccctggccaagcccctcttccctgtactaagataaggcccatgtgacaaagccgggactcctggccctgaggttcaccctcctctaccaggagcaaatcttggagcttgcagcagccagaaccaatctccctggagttgaagacagattgccgtgtgctggggctaagagagatcctgaagacttatgcaggtaatggatcctgggggagactgtagtggacagtgggagggacccctcccagagatagaaaatggttcagtgccctctgggtgctccatccagcctcaccccttcatcattgagaaatctgtggctgaatttatcagagggctctcacccatgtcccctggccctatatcactgttaccaaccaggaccttttcttctagctgatgtgcgcttggatccagatactgcttactcccgtctcatcgtgtctgaggacagaaaacgtgtgcactatggagacaccaaccagaaactgccagacaatcctgagagattttaccgctataatatcgtcctgggaagccagtgcatctcctcaggccggcactactgggaggtggaggtgggagacaggtctgagtggggcctgggagtatgtaagcaaaatgtagaccggaaggaggtggtctacttatccccccactatggattctgggtgataaggctgaggaagggaaatgagtaccgagcaggcaccgatgagtacccaatcctgtccttgccggtccctcctcgccgggtgggaatcttcgtggattatgaggcccatgacatttctttctacaatgtgactgactgtggctcccacatcttcactttcccccgctatcccttccctgggcgcctcctgccctattttagtccttgctacagcattggaaccaacaacactgctcctctggccatctgctccctggatggggaggactaagaaagctaccaccctaaccagagaggcttggaattgggcctggcccccatggggcttggaggaccgagccactgacaggtatcccctgaaactgagctgagcccagtatccaaggattcctctgtctgatcctttggtctttgctaccaggctgaagtctgtcatgaaaccacttattttaaaaagcagaggcccagtcaaatgagcattgcatcccatgagggaagcacgacagggctgatggtgaggatcagagcagttctaaggtgactcgttggggtaaggatcaggactttgtccatgtagtagccaaccaccctcttccctgattcccgtccggtgtcacagttcagtcagtgaggatgatgaagtagatacagtcttcaggacaccattagatgggctttcccaataggccaaaaaaatgctgcgcatacccagagctggttgttgtgctgaggccagtcagaggatgcttcccctgaggtttgctataactaagcaacctttatgtgactctcaccttctgacctcctggcaagagaaattcagtgcagcagggggacacagacctgcccaagccaccccactgccgttccctctctgagcacaagctgggcaaatcactgtcccttggactccaggagaccagtgtcctagtcttgccttttttctctaagtggcaggatcagaaaacctgcgagctttagtttgtattttcactttatgaatgaggaaactgaaatggccttaagggagcaagttatttctttttttttgacacggagtctcactctgttgcccaggctggagtgcagtggcacgatctcggctcactgcaggctctgcctcctgggttcacgccattctcctgcctcagcttcccgagtagctgggactacaggcgcccaccacgacgcctggctcatttttttgtatttttagtagagacggagtttcaccatgttagctaggatggtctcgatctcctgacctcatgatccgccctcctcagcctcccacagtgctgggattagaggcatgagccactgcgcccggcccctggagcaagttatttcttacaaagctgctgaaggtaagattatcaaaattataaagcatttttcacactcaagtgaaacaaggttgacaaactcacttcgcaggtcacatgcctatacatcacttattatatttgggtctgaaacttctcacatgtttgggaggttttatgtgtcctcattgggaaaatgggtgtaattcagcataaaacctcatatgattgtcctgcctcatggagctgttgtatagatcccagatccatcccatgatttgttcctgtctgaggcatagaggcaggcaagccgtggattttgcacatggtgactttcccactgtgccatgatacagtctgcatcttatagcagtgcctttgtctcagggcctctgctggcagtctagaccttttgggcagaaaggagcttcaaatggctgtgataaggaatattaaaaattgtgtttctactttaattgtattggctgttcatgtatgtaggagttaaaataggccaaactggagaaataaacgcattctgtccaccatg

SEQ ID NO: 470 - DNA, 705736 bp, Homo sapiens
  source 1..705736: mol_type = genomic DNA; note = NC_000010.11:c34815296-34109561 PARD3 [organism=Homo sapiens] [GeneID=56288] [chromosome=10]
acacagccccgggcagccgccggcgagcgcgccgcgacgccgaacaggtggccggaggctgcgggcgccgcggcggggagaggcgaggcaagccccgggcgaagcgaggcgaggcgagggcggccgggccgggcatgcgagctgagcggccccccggcgtcgccgccgcctgcccgcgcccctagccgcccgcgcgcccgagtccccagcggctcctccgcgcccagcgtcctcggtcccggcctcggctgctccggctgcgctcggcgaggggcgcgggcccgcccgcggcggcggcggcatgaaagtgaccgtgtgcttcggacggacccgggtggtcgtgccgtgcggggacggccacatgaaagttttcagcctcatccagcaggcggtgacccgctaccggaaggccatcgccaaggtgaggggccgggggcgcgggcggggagggggcggcggcggggacggcgccgggatcaatatggcgcttcctggaagggggaggagaggcgcagggaggcggggaaagggaaagtgcggccggtcgggcctcgcgggcgccccccgccccggactgcgggcgccaaagttctctgcgcgggccggggcgcagcctctgggacacccagccgggtcccgcggcccccgccctcaccctccgcccgggagctccggcctcggtagcgcggggcgagccgggcagcggcgcataggccggccctgggcgcctccccggagtctgcagacccagccaagccccgagccagcgcgcggggggcgcaggccgggaaatccagccccaggcctttcccggctcccaggccccgggggcacaggccggggactgggaacttttggtgtgaggagagtttcgtgactgcccttccgacagaggcgggttgcgagccttctgcctcctctcccttactcgggcgggggcggaacagcggcggggggcttttcctccatgtcccctgctggtaggggccggcaggggcggcccgtcgcgtccgggggctgcagggtttggggagtcgccggcttggggtcggggaggcgttcccgggagggccaccgctggcacttggcactcgcttgcgagcatttactgagctgatcccacttgctgggctctggaaagcacaaccttggaagagtcgcggaatgaaaagttttcctgcgaggacctcagctcctacctatcccgggctggttccatgtggctgggctgcggggccgggcctgacttgggagttgagtggatttccctttttcctggtggactgataacattgtctccacttcacagcattcctctactgtgtgtcagaagtgaaaaggcgttttgttaaattgttttaccgactgtgtctgtgtttgacaacagcccacgctgaagtttctcccaagcacccggggatatatttcctttgtagtagagtcctctttggtggggagcgcattcgtttgggtgcagtatttcccatttgttcccgacagtggcctggcccctgtgggcttgggggctgcaaatgacgttggaaagtggcttggtcagccctattgagcgtacacagggtactccggtggcatcttcagttctctcagaaattaagaagtaaaagctttttagacttttgttttgcttttagtatatattggaaaaaatagcataaatttggccttttaaagataattttgggggacgtttggagacccgacacaaggatggaagacgttggctttagtagctctgttatgttccttacagttgaactcttttattgaaaatcaaataaaattagtgggaattgggcacctgtttatcttgcaaagctgacaaagggaaagaaaaccatctaaatggacatttagcatttttaagtgttgtttatgtgtgacagtttatgctttaaatgttccaaaagagtactcaaattgttcaggcactctggaaaccaacaaaacaaattgtgcaaggaaagagaaataaagtaatatgcactctgcagtacgtctaggctcctgaataggaagagggtggtcaacattttctttcactttactaattttatgtgattaaaattgttttacctactgtgtcccatgtttcatcctgcacaaaatagacataggctgaactgcctgtttggcagtagttcaaatgtagttgttccaggcattcgttccacagaaattctgaagctttgactgtgtccatggcactgttctgggtgctggacatctaagggacccactggctgtgagaagctgagcaagaggctgcggggtcctccaggtgaaggagctggtgatgacatggggagaagaggtggcctctgggatgctgggtggctagagtgcagggccttggtcacggacctggtccttattaacgattagcagtggttgtttcacagggcgtagaaaagggagtgcagttttttaagggtgtctgggaaggtgtcacaaagagaaaaggggcctatgagctgaaggaagggagggtgatagtgacatgggagttggagatgagagggagggtcagagatgggtcaggggttccaacacttacatgctctttaagtacaacttagagttctgtaggtgaattttaacgggggctttgcagtataccaagttcagtcattggatcccaagattgttgacccttaaatgttgccagagctggagtgtcttctaggtctcctttttctcgtttttcttctgaaattgctagacaatgattaagattaatttttagtctttcttactacttttcccattctatattaagtgatgaggaagtgttaatatgtatttaacactgttttaacttttattctctatctgttccttatccgtattgcctaatagaacaagagaaattctgtgtgaagaattgggtggctggatagttgtggagtggtgtttaggttgctaggtgacatgtggcttgatgagctcccatctggtggggaaaagtgtgggcagatcatgtttatggctttggataataaccaaccaagccaaaaataaaaaataaaaaggaaaagagaaaggtcccaactctcaaatcaccaaggctttctctgcagtaaacattttctggtgtggtggggctaattttctggcattgcatgtgagctgttttctcttcagattacacaaatcaatttttctggatagtgaagtgtcatgatttaatactagacatgtcctcagtgagtagatatttgaaggcttatgcttagtcatgtgtgacatttcttttttcctctcctgaaagatggttttgtggttgtgatcactgatggttgggaatagctgttcatcctcatccacccatctgcattaggagcctcgctgaggacagtgcggtgctagacattgggaaccgcgttacatggaccgttctcatgagggcgcaggatgggaggatggaccgtgtctgcatctgttcttctgcgcttgcgacctgacacgcgtgattccaggtggacatggtgctgagctgcagcgctgtgtggggttggttgaagggctgctgtgtataaaaagtcatgctctatgaaaaaaatataagactgaattcgtgcaattttcaaaaaaaagtataatctaggagacaggaagaatatataacagtataaataacaggaggtggtagcattaattggcaccactgtgatacagtcagtaatcgcttctggattttggaggtgggtgctatcattatggggtgtgtgtgggagtctcatttagtcactaggatttgaactgggcttggttggtgggaaggctgaccttgatatagggcagtgcttgctaactgggtgaggcacctgcctgcaggggcagatgggctctgggtctgaggtctgcagttggggtctaggtgtgtgaatctgcagaatgtctgctacgattctgataagtgaaagggagggcattccaggaaggcagtatggacaaaggcgattcaggcattcagcccagggggtcaggatcaaactgaggaggacagaatgccagggcaagaccctgagacttcgtgcagtaggaaggactgtggtgtttagctaagagtcagggtaacaagtagttctaggaggatgacctgagcaaccttagatgaggtttggatggataattccttagcatttcattctaaataaaggttgctgagtgaccaaaaggggaaggagagagtgaagggcaaaagtgagggcaaggaggtgctggagcccctttgctcactgttcccacctccctcatagctctcctctcagcctgtaggggagctttggattgggtttggtgacttaggtttacaagccatttaaccttgggtataggggagctttgtattgggtttggtgacttaggtttacaggccatttaaccttgggtacaccaaccctacggagccccattatctcaagtggaatattccctggcagggttaatgtaagtattaaacaggatgatgagagggaaactctaaagtcctgggcccggcccatactagctgctccgtaaagatgaatggaatcaccaatatgttttatccaccaagcagttttacacccagggaactttcccaggtgtcccactattgctgcttggatttttcctgtttacttaaaaacgcagcatgtaatttcattgaaggataggtaagaatgtgagattgaatgacgtgcagcaccacaatcaggagaacaaaattgtgtgttgcatgtgtgtatgggctggggaagtaaaagctgcgggtattggcttgattacaggttgattattggggcctctggcttctgtccccaagcacatcactttagagtgatttaatagcaacctgttgttattacaggttgagcatcctttatccaaaatacttgggaccacacaagtattttggatttttctggactttgggatatttttgtatatataatgagataggttgaagatggaacccaagtctaatgtattgttagaatttatgtttcctacgtaccttatacacatagcctgaaggtaattttatgcagtatttttgtgcttgaaaataagtctgtggtaagtacttacatgtggaattttccaggtgtggcgtcatgtgggtgctcagtaagtttcagattttggagtattttggattttggatttttcaattagggatgcttgacctgtattttttaaaaagttgagctcatggacagaaacttttgaaaatgtgcttttttggtggcgggagactgttgattagtaacaatgacagtcatggtttttatgaaaaatcttgtggttggtatggaatttttctgtgaataaatgtatgactgcatgttattcatttacaagcgtattgaaacttttaagaaaatagttgtactgttgcagagattgaaagaaaatagaggcaagcataaaaatagtgaaatgaaagcagctttatttatttatttatttttttaacattttctgccttccctctaaaaaggaaaaagaaactaaacatttttgaaaggctgatctttccagaattcaagtcacattgtcctctggtgctgaagcgcctttgtcccgcgttctccaagtcctgccttctgagcacagcctgtccctgtagggacccctcttgccttccagccactccctctgcagctgctccaccccctgggactcacatacactttgctgcctctgttctggcattttctgtttcttctgcctgggacatttgctccttccttgcactcattcgtgagtcttagcccagacagccatctccaggaggctggctctccatcccaagctgctagaggatctttctccctgcctgctgcctctcctggggacgtcctgggtgtagctcctgtaccgactcagatgcttgggctgtgctgtgtggttttcaagtgtatccgtgcgcccttcctccctccgggtgaaatgcttgaagcggtggctgagcttcagtcttggtgaatagcccgtgtctgtcacattgcagtcagaatgttgagtaaatagaaagctgagaatcaacatgttacactgctctcacacaaaaaatacacttctgctgagaggactatcatcagcactcgtgaatttaaaggactttaaggtttggtgtgtttgacctactggcacaaacagcttgtaatggaaactaagatttaatgaggtttggagtacttggaagttactctttcgtatcagctgtcttgagggagttcagtttgtttttcagctcaagcagaggaccctcctgggattcgccttgggcgaggttcaaggcaggtggccagggctgtgtgagaatctggccctggaacacacctatgcttggtctggcgcctctgattccgtcagttgagatgcttggctgagtgccaggactaagtaggaatgtttaggatctgagattctcagagagaatctggcggatgtgaagcgcttcttggcttgtggtagacatggataaattggttgtggagggaatatttaaagtcccacttggatgcaaacccacagacggatcctccgtctgtcctgggaggttctacctccccacagagttgggtgcaagttggtgatgttgagctccccatagatgattagagccctcggtattttttatcaaggatggaaataaacatgtaagattgggccagaaggtgctttctataggtaattttccatcgggggagatggcatgctaagcccacacagcatgctttcatcctgcttggccactcgctcaacattcctggctgggaccaaggtcaatggcagtagagctggacatcagtaaatgtatacagttttacctgttttgggtaccttttctgtacaaaagcaaatctttatcaaaataaatgccgagttcagtgaataaagtagaaagatgactgatttttttttgtcttttagtcattatttacaagttttttctttctttcttttgttttttttgagacagggtctttgtcacccaggctggagtgaagtggcgtgatctctgctcactgcagcctcaacctcccaggctcaagcgatcctcctgcctcagtcccccaagtagctgggactacagttgtgtgccgccacacctggctaatttttgtagtttttgtagagacggcatctcgccatgttggctaggctgatctcaaacacctgagctcaagcaatccacctgccttggtcctccagagtgctgggattacaggcacgagccaccatgcctggcctaaattttagcaaataagtaaaaataactttgttttaacttatttagtaaataagtaaacattttagtaaataaagttaaaataactttcgtgtataggtctgtgccttcttgcatctggcctgctatctttacgtggtttttgccatttaaatattacttttgtgtattccttttttctccatcaactcatattggtccttgcaagtaaaatttcaagctccacatccaagtgactttaaatatcaattatttatttttttcacctaaacagagtatattttgtatatagtctctgtactctattctgtatatattttatatatactctttatatatatacacacacacacaagcacacaagagaaatgaaaatgtgtacacaaaacctgtacatcagtgttcatagcagcaagcccacatattgtataattctgttcctataacatgaccagagtgggtagctctatagagacagtagagtggtgttccgctaggactgggagtttggagtcatggagactgtgaatgggtatgaggtttccttttgggatgatgaaaatattctaagatcatggtgatggttgcacagttctattcaagtgtatactttcaatggatggagtttatggttatgtgattatatgtcaataaagatgttagaaaaatagactgcataagccactatgaacaacgctccatttttaggtattttgtagttctgagcatttcataaaatgacatatatatgtgtatcagagatgctcaaaacacttcaaatgaaaactggctgtctttaggagttttccatatagtgtggaatccctgctttctcaggcctgtccaatgtgtcctgtttagtgtctggtaagctcctggctgctgagcctccaggtcccctggtctctgtgtgctaccccctaccccctctaagggcttcaccaattgttctttagccagagactccttctacccagctcgccagctacctttgtgcagtggaggttgagaatgccccaaggatgcacgtaatggaccagcctttccagcatttggctttggctcccagaaattttgagctttggcaaatcttacaagctctgtgagcctctgtttccccatgttctcatattcagaggtgctgggctggactcccactgccagttccctgagctgtgcagggactcctgctctgcatggtttgttttggtgctcatgggaccataagtgatgtgcagtggcttttcagatggttatacagggtccaggacctcttactgcttccctccatgctgtgagaatattttgcctcaccccgacccccccaactttgaaatgacggggcttgctctccaggtcaaatggatgctattcagagttagggtaaattttgcttagggttggctgggtgagaaggctcacgcctgtaatcccagagctttgggaagctgaggtgggaggattgcttgaggccaggagttcaagacccagcctgggcaacatagtgagaccccgtctctttttaaaaaaattagccaggcataggccgggtgtggtggctcacgcctgtaatcccagtactttgggaggccgaggtgggtggatcacgaggtcaggagttcgagcctggccaaagtagtgaaaccccatctctacttaaagtacaaaaaatagctgggcatggtggtgcacacctataatcacagctacttgggaggctgaggcaagagaatcacttgaatcctgggaggcagaggttgcagtgagccaagatagcgacactgcactccagcctgggcgatggggagattcatctcaaaaaaaaaaaaaaaaaattagccagacatggttgtgtgcatctttagtcccagctgctcaggaggctgacgtgggaggattgcttgagctcaggagtttgagattgcagtgaactatgatggtgtcactgcactccagcttgggtgacacagcgagactctgtctctaacagaaaaaaaaaatttgtctagggtgtccttcagaatttccttccttcttcctttttttttgtctttttgagacggagtctcgctctgtcgcccaggctggagtgcagtgacgtgatttcggctcactgcaagctccacctcctaggttcacgccattctcctgcctcagcctcccgagtagctgggactacaggtgcccaccaccacgcctggctaatttttttgtatttttagtagaggtggggtttcaccgtgttagccaggatggtctcgatctcctgacctcgtgatccgcctgtctcagcctcccaaagtgctgggattacaggcgtgagccaccgcgcccggccccagaatttcttattgtctcaaggtaagtatcttttaatgtaaatcacatcatgctcagaagtgactaagacaattccctttgtgaattacagatgtatgatattgcatgatacgaactgtacggtgtatatatatatatatatatatatatgcacatacgtgtgtatttctggggtgatcttttatggtggtataaatttaagtcattttagagatgatagtcaagtcaacattctcccaatcttggtgtttttaactattcagacactgtaagatttaaggttttggaactcagatgtatatttttctagtgtctggtttttcccttcttgtatttgagacggagtctcactttgttgcccaggctgcagtgcagtggcagagtctcggctcactgcaacctctgcctcctgggttcaagcgattctcctgtctcagccttccgagtagctgagattacaggcgcctgccaccacacctggctaattttttgtatttttagtacagacagggtttcacaatgttggccaggctggtcttgaactcctgacctcatgatccgcccgcctcagccttgcaaagtgctgggattacaggcgtgagccaccgcgcccagcctttccctttttgttgattgtaccgcatccctttagattagaaaactaatctatgttatagggtttatatatttcaaaaagcctctttgagatagactacactaaaaatcagtgtttccttcttcaacacttaagaaatcaacttgatattatgtctcaaaaacctaaaattgctaaccaatcaaaagatgtgtattaatattaaaaacacaaagaaaggagtgttgtttttgtgttggtggtatatatgagactagatttttttgttcaatttcttttacatagacaatacaaattggaaaaaagtttttatgtctgtgttttaattttcttctctaagtccaatgttaagtccaaaattaaaaaataaactctttagaagtctgagggacaaaggaaaaaagaaaactcttccaggaaacgtattttcttataccacaaaggcatttaacatgtgtcatttataatgctgaaacccagtgtgcaaaaccatatgtgaataatggttagccagattcctgcccagcagggttatactctaaacttggatttcttttattacagacagcagcacctgcagaagaaggaggtaaaatgtgcaggatattggttcctgatgtactacaacacaggatgtgactaatcactaaattcattaatgttgaacataggatttggtacctttaccactttgttagagatctggaaaaaaaatcttctagacaaatcaagttgatcttggccaagtgcagtggctcatgcctgtaatcccagcactttgggaggccaaggtgggcggatcacttgaggccaggagttcaagaccagcatggccaacatgacaaaaccccatctctattaaaaatacaaaaaaatttagctgagtgtgatggcaggtgcctgtaataccagcaacttgggagtctgagtagtgagaatggcttgaacccgggaggcagaggttgcattgagctgagatcgtgccactgcactctagccttggcgatagagcgagacttcatctcaaaaaaaaaaaaaaaacaaaaacaaatcaagtagatccctaagtgcatcatttggattgataactattttttactgcatctggaaggtggtggcattttagcggttgtcatgttgaggaatatgaaataaatatattttaaattatgaaagcacatcctatcaggaatattttttccaaggaaacttgcaatgctaacaaactcctgaacttgattattgttattttttatttttattttttattttccgagatggagtcttgctgtgtcacccaggctggagtgcaatggcgcgatctcggctcactgcgacctccacctcctgggttcaagcaattctacaacctcagcctcccaagtagctgggattataggttccagccaccacacctggctaaatttttgtatttttagtagagatggggtttcaccatgttcatcaggctggtcttgatggagtcttgaacttctgacctaaagtcatccgcctgccttggcctcccaaagtgctgagatgacaggcatgagccaccgcgcccggccaactcctgaactttctatggtggagtcatttttgtcttttacgttttaagactcacacagatgtttgcaaaaacaccgttagctgaaagtggaaagtttggtgatgggtattttgcttctaggaagcaaaaacatcagagtgacacatcatggatcaggattctgaagaggaatctctcccagacatttatggagagttaagagaagtacctttgtgagcacgtgattcctgccttctatttttttttttttgttattatttatttttttgagacggagtctcactctgttgcccaggctggagtgcagtggtttgatctcggctcactgcaacgtccgtctcctgggttcaactgattctctcacctcagcctcccaagtagctgggattacaggcatgcaccaccacgcccagctaatttttttttttttttttttcatttttagtagagacggggtttcatcttgttggccaggctggtcttgaattcctgacctcaagtgatccacccgccttggcttcccagagtgctgggattacaggtgtgagtcaccgtgcctggtcgggagtcctaccttttaataccacctgctttgtggggttgttgtctgggttcaaagagagaatgtgaaaaggtattgtaggaggccaggtggactacatgttagccgtactgtccctttgtttttaccaggagtgtttgccagtgattaagtctcactagaataggcttttctaaattgttttatctcatcctcattagaacttcaccacatgtgggaaatcatgtggcaaaactgtctctcttaaaaaaaaagtcaccaaggaaacctccttctgcaatttaagaaataaaatcccagtgacattgatttggatgctccaaacatgtccataatggaagagcttttccaggttttggtttgggccccccagaccaaagctttgacacataatacaagctctgtaagtctgttttcctgtctgtaatttgggattgtcatctttgtagggtgtcatggagattaagttattcactgtagacaatgcccctttcatgtaatagattctgtcagtattagatctttttctttctcttcaagtttcaaacatagattaggcaaaattttaatggctatttcacaaaatcagcttgattcttgtttatgacatcaagtgttgtttttccaggttgtctgttaaagggctacttttttttttttctaaaagtgctttagaaattccagtgttagtatgtatgcatcatttagctaagaatgaagatataaagatcacccaacagtttaagctgattcttttacaggtcaaggagaattgtgtttgtctagctgtcttagccgtgtaggactttctacttgttacttcctaaataattgcagccgcaacactgctacttcaaaggaaattacataaattttatttgctgtatttaaagtacattaaaaggcatcacttacacatttttcattaaaaatacttttaaaacttggaaaggataaaagtataaaatgtaaatactgtctgtattaataaaatgcagagatgttttaaaggcctttagtgtttattaactagtaatagttctgagaataccctggagctcaaatagataatctgtgttataaaataaatgggaaagttgacatttttgtgacttttctaatccttactatataggcctctataattcatgtgcccataacacttcttaagatgtgattttgggcatcttaagatggtgatttcgggcagctaaatcagcaacaaaggaacacagaacatcttttgcttaggtaggtagttgtaagggttgacagattgatgcaacttttaatactttagtttggctaaaggcacccagtgcaaatcacctgaagacttcacccaggagttgacctatttatcatactaaatagggagtggcgtcttgaaggctcattcacattctgggcttggcaggcagtgcgatgaagtcagacttgcagttatcaacaccctggctttgtattcaagaggactacctcctctcatccgtctttttcataccacagtattgaaggggttgttttcctctttgaagaccttaaacatctcattaattaaagtaatgcttcttccctctccccatatgcatttagggaagtcgctaagcagtgattgaagtagtaaagcttatctaatggcacagcactcctattttgactctgatcccttcctgtatttatttgtaaacattttttcatgtgagtgtgtttgaaattccaagttttagtttcctacaggatgtgaaaaagacctagcagcacgggagataggaatgtatttttgtgcgtctgtctcttgccttcacgcttcccctttgtttttgtgctttgctaatggaagtgatgaatggtgctttcaaaaactttccagaatactcaagtgttttataacaaaattgcagagaaataattcggagaatttttgacagatcttagagtgttttgataggggggattttagtccgaggcagaagagttttggccctgcattgtttctttaccgatgagaagtgaagctgctttctttatagattccggggagtggtattttcagctcagtctctgcttttggtgttagaaagctttttaggtcaggactcatgatcgaaagctcttgcataagaggtgcttttatcaggggcattatttatctgcctattagtttaggaggttgttgggaaggtaccgttttaacaacagtgaaacctgtcacttttttttcattcctaacttactgtgaaggagtctcagacagcaaggaggagatccaggagacagtggtatcagaaaatggtagtattaccattattattttttattttttgtttttttgagatggagtctcgctctgtcacccaggctggagtgcagtggcatgatcgcggctcactgcaagctctgcctcccgggttcaagcaattctcctgcctcagcctcccgagtagctgggattacaggtgcccactaccacgcctggctaattttttgtatttttagtagagatggggtttcacctggtttatcaggctggtcttgaactcctgacctcaggtgattcgcctgcctcgacctcccaaagtgctgggatttacaggcctgagccaccgtgcctggccagtattaacattattatcaagagtaatggtaagcactcatggcacatgttgtatcaggccctatgtgctggggtcagtgctttatgtgtatatgttaatctcatggagttgtgatattggtgtaatccagagtttacagatgagtaagcttgggctagagaggataagaaactttttttttttttgggaagttgcacaactgagggtcttgctctgtcacccagactggagtgcagtggcatgatcatggctcactgtagcctcaacctcctgggctcaagcattcttcctgcctcagcctcccgagtagctgggactacaggtatgtaccacctatgcctagttaatttatttttatgtttgtagagatggagtctcactgtattgcccaggctggtcttgaacttctgggctcaagtgatcttcctgcctcagcttcacaagtagctgggactacaggcatgcgccaccacacttggctaacttgttttttttttttgtagagatgaggttttactttactgcacaagctgatcttcaactcctgggctcaagtgaccctcccactttggctccccaaagtgctgggattgcaagtgtcagccaccgtacccagccggcttggctgcctttggcagactctaacttcagagcctgcacagtgagttgctataccatgacaaactgatgtgcattttaagatgctgcaattccataagaaagagtaagtgatcccgcgggagaagaacagggttttttcctgacttgggtttgcttgaatggcttatgggttcagggaagaagtgcacctttgggatcagcttcaggctagtgagggtaaaaaaggtgcatggctagctgtcaaagacccttgcttctctggtgtggcctctgggccagcagcactggcatctcttgggaacttgctggaaatgtacaatctcggggcccattctagacacctccgtataggaatctgtattgaggctgggcatggtggctcccgcttgtaatcccagcactttgggaggccgaggcgggtggatcacctgaggtcaggagttcgagaccagcctggccaacatggtgaaaccccatctctactaaaaatacaaaaattacctgggtgtggtggcaggcacctgtagtcccagctactcgggaggctgaggcaggagaatcgcttgatcccgggaggtggaggttgcagtgagccgagattgcgccactgcacttcagcctgagtgacatccccagttggtgctagagcaactgctcttaaccttggcagcaaaggttttagaatgttgatacctaagctccatataaaccaagggggtgaggtctctgggtcacgtttggagattggtgtttctgtaaagctcttcaggaagctcttcaggtggttgtctgtgcagccgggttggaggactcctggcccaggccaacctccagaccttttggagttgttgcattatgtgatttgcaaccctgctcgcctttggactgtgcatggaaatttccaaaacacaagttgagatgatcagccagcatgctcaaaggctggtcacttgtgtgacagtggatcagcctgtatgtgtgggtttttttttttttttttggagacagagtctcactctgttccccagtctggagtgcaatggcgacatctcggctcactgcaacctctgcctcccgggttctagtgactctcctgcctcagcttcctgagcggctcgggttacaggcacccaccaccacatctggctaatttttgtatttttagtagagatgcagtttcaccatgttggtcagggtggtcttgaactcctgacctcaggtgatccacctgcctcagcctcccaaagtgctggaattacagttgtgagccactgcgcccggcatgttttttttttcttcttcctcttctcctcctcctcctttcttctcatttcttcttctcctttctccttctccttctccttcttcacgggacagggttttgcacttgctgtgttccccaggttggagtatagtggtgccatcaatagctcactgcagcttcaaactgctgggctttggtaatcttcctgcctcagcctcctgagtagctaggactacaggtacatgctaccatgcccagctcattaagcattttttttttctttttgtagagatgggttcttgctaagttgcccaggctgatcttgaacttttggtctcaagtgatcctcttgcctcagcctcccataacactggggttataggggtgagctaccatatccagtctgtatattttctttgtgtctttgtgtgttttcttttttgagaccgagtcttgtgctgttgcccaggctggatatattttcatttttgacttttgaagtcattcaattctcctgcctgttaattttgttgagttttatttgtagaaacagagacaacacatgtgcaaggtcatccttaggttttagctgttgactctaaatgatgtctagtctaatagccacttctactaaacagaaattggttaaggaagggcagtgagagacagcacgggggagttgtaatgagatgggggaaggaaaggccaatttggataaaatatatgagttatcctttgagccaggttatgtcctctgggtgtttgtatatatagaaaccggtcaactatggtatttggttttgggtaaagcagagatgagggcttctgagtagtggacagaatacttctcttgcaagagttgcttttcgagcttgtttatggatacacatccatttttattggatggagcagtagtattagagaagactgttggcacactttcacaaagtaggtaagggattccttttctacatgtttagactttactttggccaggtgcggtgcctcacgcctgtaattccagcacgttgggagactgaagtgggaggattgcttgaggccaggagttgagaccagcctgggcaacacagtgagaccctgtctctacaaagaataaacataaattagccaggcgggatggcatgcacctgtagtctcagctactcgggaggctgaggtgggagaatcgcttgagcccaagagttcaaggatgcagtcagttatggttgtgcccctgcactgcagcctgggtgacagagcaagaccttgttaaccacttacttagctccttggaacagtcccactgaacaagtcccctcatgacaccagattgccagtgggcctggctgttgttggcaaatataagctcctggttgtgctgcctcatgaacctaaccatgggtctgacaatttttatgtccatggattgattttatttcatttattttattttttttgagatggaatctcgccctgccatccaggctggagtgcagtggcacgatctcagttcatagcaacctccgtctcctgggttcaagtgattctcctgcatcagcctcccgagtagctgggattacaggcatgcaccaccatgcctggctaatttttgtatttttagtagagacggggttttgccattttggccaggctggccttgaactcctaacctcaggtgatccactcgcctcggcctcccagagtgctgggattacaagcgtgaaccactacatctggccaggaaataatttcttcaagggtactttcagggctgcaaagtgcagttctttgaaatactattttaaaatattttcttcaaatctactgcaactatgggaactgactagtactgaattttatagacctgatagaaattactctaaagacataatgtgtctgatagtaatgtccatgtaagaattttaaaaataatattcagcagtttcaaataacacttaaccccaagttgatagtaaaaatgttttttgaaccctagtttatatttaggtgttgctgcataaccaacccaaaacttaatggcttaaataaacaatgatttaattatatctcatgattttgtgggccaggaatttgggcagggctcagctgggttattcttccgtgccacttggggttacttgcatgtatttacctggcagatgatgacctggcctggaaaatcctagatggctccattcatatatctggtgtttggtgggggtaactaactagaatgttgggctcagctgggacttttttttgtttttgttttttcaggttcatagtttattgtacaaattgaattatcacatgatgagttgacattagcttttccatggaacttagattagcatgggaatttaacagatgaggcacagtttggaacccatttatactgctttcacagctggagtttttaaagatcttaacttgaagtgtaagatcatgaaagcaatgtctctatgtgtcaattcatcccacctgtgtgagtataagagttgactttttaatttttttatttatgttatgttatgttatgttatttttgagatggagtttcactcttgttgcccaggctggagtgcaatggcacgatctcagctcactacaacctccacctcatgggttcaagcgattctcctgcctcagcctcctgagtagctgggattacaggcatgcaccaccacgcctgactgattttgtatttttagcagagatggagtttctccatgttggtcaggctggtcttgaactccctacctcaggtgatccgcccaccttggccaaagtgctgggattgcaggcgtgagccaccacgcccggtttttttttgagacagggtcttgctctgttgcccaggctggagtacagtggtgcagtcagctcactacagcctcaaaatgctgggctcaagtgattctcccacctctcagcctcccgagtagcagggactacagatgcgtgccaccatgcctggctaatttttgaatttatgtagagatagggtcatactatgttgcccaggctggtcacaaattcctgggcttaagtgaggctcttcctttggcctctcaaagtgctgagattataggtatgaactaccatgcctgctctgaaatacgttttactaccagtgaactggaattgggcatctccctccggacctgccgtgattttaatcttgccaaagccacaatcaatcccacagccagtgtccttcagtgcaagcaaccctcaggtgggacttgttgactggagcacctgcatgtggtgtctccagcatagaggcttccggatggttggacttcttgtactgtggctcagggctcctggacagtatcccaagagtcaggaagaagcagctgtcactctctcaagttttagacctggaagacagcacagctttattgtccctgtattctatttgccaaattagtcagtaagcctgcctaggttcagggcagggcatgcagactccacttgtcagtgtgaggagtgtccaaggccttgtggtcatctttattctgccatagatacgtgtgtatgtgcgcatatgcgtgtgtatcacatataacatcaaacatttttttttattgttatgtgtcatgtttcaaagtcatctttttcttgatctgggcaagggcaataaaatgtatgtcctgaacttttgaagctgacaaacttaagaagtagtttgtgttcatatttcatgagcccaaagatctaacaactttcccaggctatgtggtagaaagagataatgataataacatcttaggtttatgtggcatcttctaagaggttcaaagtggtggttccactcatttctttatgggaatatactgtgaagtccataagcagtagtacccccaagttcatacacagaggtgggaatgcagtaatttcatcattctactaatgaacagtgttcagaaggcagttcttgtagtgatctgtttactgatagaacttctgtgaatctgcctttcttagataagattttggaaaatgatagaaattaacttttgtgtgcctggtaatacataatatactatttatcaaagagatgtcatatttgaagaagagtcagttatttttctgaagtgaaattctttgggggagaagttttagaggtatggcattgcagggatgtctgtagtagattaaaaagtctacatcctcagcagaggcagaaaaatacagtggaaagggtataggtggttatgtggccatccctgtactgagtatatggccaggactgagggtgacactgcaagtggaaacccttgtccccttgtgatatctgttcatgagtccccccaacccccaccccccgctgactgtgggagtgtctctttgtacttacgggagattgaatggagttttcaagtataattcaaccatatgttgagtttgcttacctttgctgtttagagcttatcctttgagtaaggtgcaagtcgactgtaaatgtggtattacttaaatacattccatttttcttaaaatgagatactttacctctaattgaaggtatcaggggataaacagtttttcaggcaccatttgttatggattatctcctggttcatgaatattgcattcttatgtgaagtgatccacccttcatgtttccccagagtaaaattttttttttttttttgagatggagtttcactcttgttgcccaggcaatggcgcagtcttggctcactgcaacctccgcctcccaggttcaagcaattctcctgcctcagactcccaagtagcagggattataggcgtgtgccaccacgcccagctaattttgcatttttagtagagatggggtttctccatgttggtcaggctggtctcaaactcctgacctcaggtgatctggctgccttggcctcccaaagtgccgggattacaggtgtgaggcaccgtgcccagccttcccagagtaaactttctaaggatggcttttatatccctgactagtacagagaactccatgggttctgtgtggttttccaagtagaattcaaatttatcagcctgaaaactgaccccagcctgccctcttctctttaccgccacgaccccttccttccctctccctgatcatggcagaactgactctcactgctgccctggagtcctactgccctccagctcccttgtgttcgtgagttgtccctggcctgggatactctgcccctccttttccctctcctcttggctctcccattttttcatctgcactgctgccagagctgtgctttttgttcagaaagctctttgtggcctctgcgacggccccccggctccccaggtgggctcaaggctgactgcaccaccctgggcttctcagtgccacaccaagtgccactgctggagcccacacctgcagtccctgctgcagccccaggcattgtccagatggtgcctttgcggattctccacccacaacccagggagatgcaaaagtagattatgttgaattcaaggtatataaagaatcactgtacaaacatgtgctttttgaaaggaagttactccgataattttgaccgtgttattacatgttttattagttgtaaataattaaaagtggatgaacatttaagagcgagtgagctgataccatcaaggaggatttctgcagtctccttctttggcgagggtgttcacccagcagcctgtaggcatgagcagtgcctggagtcctctgctttctgctgccaaatttgctgctgcacaggtcactgtagacctcctgggtgcaggtgcagctccagcgggtggcgacttgttcctaggtagacagaacagggggacatgtatccttgtgggaaaacagtgtacttgagaactgcagggcagtcacgactaatgctgttattaagaaatactcctggctttgtgactctgggtgtttttaatcttttataattaaacataagtgaatattgaggtgtattttagcatttgctgtactctgctaagtagagtttgtgacgtgttgataatgggagaatgggtgctactgtagtaaagaaaaacagagagctggtgctgggtgcggtacctgtgcctgaagtcccagtgctttgggaggctgaggcaggcgcgtcgcttgaggccaggagtgtgagacctgccggggcaacacagcgagaccttgtacttttcttcctacagggaagagcctgtagactctattctgtctccacaggtcttctcccacccagcgttgggtggagccagagagctccgcaaagagcacgtgggcgcacgtccggggagagctaggggtgcacaggtccggggcaagcacgtgggcgcgcatcctgaggcaggaacagggcgcatatctgagcaagcgagcacctgggcgcatgtcacgaggcgagcacgtgatgcatcctgggaggtggccgagggaggctcaggagagattggagtggagttgaaaaagcaggaagcagagagggaagtccgtgtgtaacaaaacattcagtttgtaggcccttgggtcagaggaggtgacagccataattttggctccctgggaagggtctcaggcagtgtcctgatttttttttttttttttaaacgaggcagggtctgactgtgtctccttagctagggtgcagtggtgcaatcacagctcactgtagcctcgacctcctgggctccagtggtcctcccacttctgccactcgaagtgctaggactacagtgactaatttaaacaatttttttttgtagagatggggttttgaatccctggcctcaggcgattgtcacagctgggcctcccaaggcactgggactctaggcgctcactaccacacctggctctgacgggttgaggctgtggggacctggctctttcactgtccttctttgccacatgtccccgcgtcttgtctcttctcgtgagggctgaagccatcctttggaggagctcaggagcttgtcctctttatccagggctcggtgttggcttcgagccggcttcctggggaggaggccccggcctggtcccgggcttggtgatgacgctgcccacagtgggatgctggggagctttggagccttggttttgcggctgccagcagtgtggtggagcatcgagagggacgcaggtgatgagactcaggccagtggcttctacctgggactgtcagggttgcctgcgttggctgttggctccctatgtagctgctgctcgttggtgacgggtacaagcgtcagtgcttctcactcagggcagtgtagaatgttacacagtgatagtttatgtctagccaggttttgaatgctcttactggaaacagtcatatttcctattatctaactgaatagagaagtaagcagttgagaatacagttgggctgcacttgtctttttttccaagtgagttattttgtattttttgatactctgaaatgatcagtaagtgtgtgtgtctgtgtgtgagcccatgtgcgtgccacgcatgcgcttccctgtgcatgcgtgtaggaggctgggatggaagggatggccataactgactgttggaatttccaggaaaggcttggaatttatttttgggtcacaggccatttttttggtttctttcaagcactaaatgatttttttatgtaacttcacagattaaagaaatgcagtcagtttttgtatgacttagtaaatcttaaggaaaaaaccctacttacattaggatacatttgctggaatatttacacaaatcttacaataaaacttttcatcttttaaaattttttatcaactcagccataacttatttattttttgcttcattttaaagagaatactcattctttttttcctctttcctggtacttcagcttctcatttgcttgcagcctctgcattgcatggatgctggtttttcagcagttctggccctaacagaagcatcctaaggataggaggatttcagtctgggcttgctagccttatcagggggagagcagagttgctaagtttccattctctgtcactttcagttactctgctgtggctgctcagtgctgttcccagtgaaataattttagcatattttttcctcttgtttctgcatcagcgtcattactgttcatgcctccctggggatcagactgattggtaaattagtgccagcagaggaagtagaagacaatgtgtgagcgtgttttatttaaacacatacactctacaatttgttttattggattttgtcctttgagaacaccacaagtaatcccattacagtctagaaactgcttgctcaccacgcctccacctttgaaagcacataagtctttaataaatgaggcaatttccagattcatcaataattaacccagaacatgacaagttttatcacaactcaaagctttcccatgattcaaacggtctgctcctgccactgaattgtctgtatagtttctggttcagcttcccagagctcaggattctgccatggagacactggtttgagcaagcatactggatgttttcttgaaaaatgttaagctttaattgtttataataaaataaattcatacttattgtaggaaatgtggccagcacagatgattttaaagaagatagtaaacacccatattcttaccacccagaataatctacaaaagagcatttctttcatttctttgcattctttctgtttgtttgtgtatatataaatacaaatgcttatttttttgggggggcgggtggtaacaggatcttgctctgttgcccaggttagagtgcagtggtgctatcagagctcatggtggacttgacctcctgggctccagtgatcctcttgcctcagcctactgagtagctggaactacagacacatgtcatcatgcctggctaactttttgtatttttttttttgtagagacagggtctcagcatgctgcccaggctgatcttgaactcctggcctcagacgatcctcctgtcttggccagccaaagtgtttcgattacaggtgtgagtcatggcacctgaccaaatgcttttaaaaatattgataattgaaatcataatgcatacacagttgttcctagttactttacttaatttatcggtgtcttcccatgtctcgcaaaaattttggtaatttttttcctttttgagacaaagtctctgtcgcccaggctggagtgctgcggcacaattcttcatggctcactgcggcctcggcctcctgggctccagccattttcctgccttggcctccagtagtgctgggattatgggcgtgagccactgtgcccagcccataatactttttagaggtcgtatagcacttcattatgtggatatacaagtattaacctagttaactattgttgggaagttaattaattttctcatttttcatcatttaaaatattgtaataatcttagtgtatattattgacaagttttctgaagtataattattggataggaaattatgaacatttcaaggccctcagtttctgcacttggccagtttgctttccagatggggtgtgccagtgtatacctggcctgcatgggagagtgctctctgcctctgccaaggaggggacctcctgggtcagtaggtgatggtgctgccactgtttttgcagccgttgttgagtggctgggcccaggactgcagtctccagtctcattttgatcatatgttagtggagctgtaataccctcttctccttgaagattgtatgagagatacatatgtaaagaaccagacctacaagagatcgagaccgtcctggccaacatggtgaaaccttgtctctactgaaaatacaaaaattagctgggcatggtggtgcatgcctgtagtcccagctacttgggaggccaaggcaggagaatcacttgaacccaggaggcggagtttgcagtgagccgcgatcgtgccactgcactccagcttgggtgacagagcaagactgtgtctcaggaaaaaaaaaaaaaagaactggacctagagcttggcccaggtaggcagtggctgcgtggtagatgcggtggtggtggtggctgatcttatatcaggtgtttagagtcgtccatgttaatggagcagagtgctgagttgggagatgacatcaactggtcctgcgctttctgggtgacacacaaagtgcttctttgaactggggttctgtagaaaatagtttggaaagcaatgtgtaatattaatttttttctttcctgagaatgttacatggagtgaaattcaaaagtttcctgatgtctagataacttcctatctgtccacgtggtcttgtaagacccttgcatgagcctgtcccatttgtgctttataaatgcatgctggggctggggcgacgttacttatacctgtagtcccaacactttcggaggccaaagcaggaggattgcttgaagccaggaattcgctagccacctggatggcataacaagaccctgtctctacaaaaaaaaaaaaaaaattagctgggcatggtggttgtgttccttcagtcctagctactcaggaggctgagttgggagaattgcttgagcctaggagtttgaggctgcagagagctctggttgcgccactgtacaccagagcctgggcaacagagtgacaccctgtctcaaaagtaaaaaaaaaaaaaaaaggatgttggttgcccatttgctgtgtgccttgggtgtggacatttttcatatattttctcctagcctgactggattatgactatgacggttatcttttctccccttcaagacatacacatgtaatttgctttttcagtcttcagggattgcttccatctttaacgagatataaaaatgctgagtacctctctgcagcattgtttgtgctgctgctcaaatgctctgcagccttactgagaccagctgtaaagagcatctgcccttagcattttccttgacaagtcttgcttggctgctcaccttcttacggacgtgggtaacttcatctggttatctgattagtaccttgtctttccttaagactctgccattttggaattattattattgtttttgagatggagtctcactctgttgcccaggctggagtgcagtggcgcgatcttggctcactgcaaccttcgcctcctgggttcaagcaattctcctgcctcagcctcctgagtagctgggattacaggcgcccgccaccacacccagctaatttctgtattgttagtagagttggggtttttccacattggtcagctggtctccaactcctgacctcgtgatctgcctgcctcggcctcccaaagtgctgggattacaggcgtgagccactgtgcctggcctatctttatattcttggtgtatagtagattcatagggatttttgctaagtctctaaggattgataaaagatgtaaaagatctagcagttttctggttacttgacttttgagctggatgtggtgctaatttttagactagtcgttttagataacatgtgtttagagcattgcaactgtctatctaccagtttttttgtttgatctacctaaaataatgatctctttgaactctgcatgccatttttggccttccaaaaaccaaatctatatatgtatattggaaaagaaatatatgtaggatcctaaaactcatttttcagtttttaaaaggcccctagtaagcagtaagtgtcaggagtggataaattttaagtggctttttacagagtacttaaatagaaacattaattggatcagtgtgtggatctcatggagatctgtccctgtcatacgctggcaggcacattccatttctttctaatccccagatgtaataagatgcctgggtctgtggttacttgcatttgccattcataaaattgctgatcagtcctcccaggtggcactgttgtttataaggctgttcaaaatgtcagtggacttctgccatccctaagagcctccttgttatttctcttatggggcctaactgctgtaaaatatgtattttaacatctagtgggatatatttctttgtttctttgggctattccttcatcatctgttgaccacttttagtcaatagttatgggtcaaagctttggccagaacacaaaatacttgataggaagagtcattgtgagaataaataacatgtagtggaaactctgacattgggatgggacattgagtgggctcatctgctgagaatatttgcaagatggagcttccacagagcctcatgggcaaagcctaaagagatgagttagctgggtgagagggaaaaagtaagttgtcagagttctgtatttcatatgtgatttcgtttgtatgtctgcctctgtctgttgacattacgtcactgattattggctttaccacacacatgagtgaagaagaggaagatgcgcagggtggggagaaatgcagggaagacactgttccttttttttgagacagggtcttactctgtcacccaggagatgacacgtaactacatcaactggtcctacattttcaggcgaacatacaaagtgcttctttgaactagggttctgtataaaatagtttgaagagcaatgtatagtattaatttttttttcttctctggaatgttacgtggagtgaaattcaaaagtttcctaatgtctagataaatttctctctgtccacacggtccgcccatgtcttataagaccttcacatgagcctgtcccatttgtgccttataaatgcacattagtgatgtgatctctgctcactgcagctttgaaatcctgggctcaggcaatcctcccacctcagcctctcgaatagctgggactacaggcatgcaccaccatgcctggctaatttttttgtagacatggtctcgccgtgttacccaggctggtctctaactcttgggctcaagcaatctgcctgcctcagcctcccaaagtgctgggattacagacgtgagccactgtgcctggactctttttctttctaaaaaaaaaaagtatgatgcaaaaaatgcttttacttcaagaagattattctgtacttcaagagtataagttgcaaaatgcaaaattaaggatataaaattgtggatttatatttctggggtttcaaaagcataaatgtgtgatacatgtgcaggtttttggatattgaggttttttgagatttgaaaaaccatttattttttaaaagataaagttatatctcatttgtgtgtttaaacaaaaagtataacatctcagatagctttgcatagacagaaagattaatgacattcctgcatgaggcattagcaattattttccctgtaatcgtccttagaactctttgtctagtagtccacatatagaatttttctgcagcacatatattaagtaatcagtttaatatttgttcctataaattaaataaattccagtatcctttttagccatttccagcagtctaaggcagggaggaaacttagtgatgagatttctggcactaacttttcaaagaggacattaagaggtgaaaatgggaatgaatgctagaaaaatgactgttgtacatcacagcagggaggttttgcgctgatgaacagtgatgtttccgcttgacagtgtgaggatatttaactttcccagccttccacaagatgagaagggatgaagagacggggaaaaaaggggaagaaaatccttaaaaaagtatattggggccgggcacggtggctcacgcctgcagtcccagcactttaggaggctgaggcgggcggatcgcttgaggtcaggagttcgagaccagcctggccaacatggcaaaaccctgtctctactaaaattacaagaattagcctggcatggtggcgtgtgcctgtaatcccaacttgggaggctgaggcaggagaatcgcttgaacctgggaggcagaggttgcagtgagccaagattacaccactgcactccagcctgggcgacagagtgagactccgtctccaaaaaaaaaaaaagtatgttggaaaataccaggagagtgtttatctccactttgccctactcttgttagtattcacatcttcattggggaatgtaaaagatcctaaaacatgtgggtctttttttctccttctgtctcacatggggctgcagttttctttctttactcttttatatattgctatttatattttatgacttggaatactattaactttttagaatactgatgtttttattttattttttgagacaagttctctccatcacccaggatggagtacagtggcgtggtcacagctcactgcagcctccaccaccccagctctagcaatcctcctgcctcagcctcccaagtagccgggactacaggcgtgtatcaccatgcctggctaatttttaagaagttttttgtagagacatggtctctttatgttgcccaggctcatctcaaactcttggactcaaatgattctcctgctcagcctgttaaagtactgggtctacagccgtgagccactgtacctggcctagaatactgattttaaatgacagaatgatagttataaaactgtgaaagtttgaaaaaccacttaatgagttgctgttacatatatagtctagttccaagtagttagaaaaaaaaatgcactaagtgatttggcaacgtactaagccaataatagtatttgctttggagtaatgggattatgggttgttctccctttttttctttctaaagtttttatgatgtggttgattatacttttgtgacaaaactgtataatcacttgtttttattataaatgtgcaagaggacttacattctttttttttttttttttttttttttgaagacggagtctcgttctgtcgcccaggctggagcacagtggcgtgatctcaactcactgcaagctccgcctcccgggttcacgccattctcctgcctcagcctcctgagtagctgggattacaggcgcccgccaccacgcccagctaattttttgtatttttagtgaagacggggtttcaccatgttagccaggatggtctcgatctcctgaccttgtgatctgcccgcctcggcctccgaaagtgctgggattacaggcgtgagccactgtgcctggccgaggacttatatccttaaatgattaaaatatatcctgaggcaaaactattccaaataaaaatggaggccaatcagaaatatttaaaaattcagataaatgtattttagagagtgtatttagaaacccagtttctagatcagagtgccatcattcagtgtgttatactcccaaattaatgctttttacctattgtcccttggattaagtaaattcaacttgactcaactaaatcttaaggtttgacaccctgacaaacatgtcttaaaatgttttaaagtacataagatttaaaaccttggccaggcatggtggctcacgcctgtaatcctagcactttgagaggtcgaggtaggtggatcatctgaggtcaggagttcgagaccagcctggccaacatggtgaaacccgtttctactaaaaatacaaaaataactgggtgtagtggtgcatgcctgtaatcccagctacctgggaggctggggcaggagaattgctggaacccgggaggcagaggctgcagtgagccaagatcacgccactacactctagcctgggtgacagagcaagactcagtctcaaaaaaaaaagaaaaaaaaaaaactttcctaatgtttgtatattctcacgttaagtccttcttggaataaagttggtgtagagtggggatgggagaaaaattaatctccgtaagttgctggggtagaggtaacagtgttttatgtgtagaggaaataatgtctactgttaagtctttcgatcagccaaaagtggagtggatagtgcttaaaatgttttgatgtcgttgtgaggattaaagttatttaaaaagaatggatgtggagttgattttaacattttgggattaagaagggtggagagttctcactggaggttgtttgatgtgccctaaggctggttgagcacctctggctgcctctgagcatgttgcagtcccctgtcaagattccctgggtaacctttctaaaattttgctccagcgcccagtggaggaggctggattctgcctctgctgtcttagaacttcagtctttccttacaggtatagctctcttcatacacactgcttgactgcaatgtgttcaggttacatgctgtccttaaatcaggcctccataatttcttggcagctttccttttgcaatcaaattagcacttgggtctagaagccagttaggatgattggaagaaaaaaattacagatggttaaaattgggtcaaagtgcacttccttactctgttctctttacaagttaaaaatatctaaaaaatcattgcagctgtgtcagcatttctcagtaggtgccagatttaggtactacctttcagaatgtttatgtactgtgaaggggaaaatccattaattatacagttctgtttgtctaaaacgttcaagaacatttccactgccctctgcatgtttgtgatttttgggccattcagttcagtctggattatccgatagagcacagtgttctgtcattggttcaggcatttggctgtcttaccccacagaactgtgtgttctaggtcgggggcaatattttatatcttttacactctgtgtatagtgctgagcatgttacagttggaaactgttaattaatttttgttctattttcctgcactcaacttttcctcccagaggccccacctgaatttaagaacaaataagttattataaagtcttgtaggaaaaggcctggtatatttagagaatcagatccagctgtcacctaccattcatacagaaccatactaaccttttcctaaaagtaccatcaggctgttggttttgtaagttttctttcgttcattttccttttaaaccaagcctcatctgtgaaaggaggctgaaatctggcagacctctttattatgctctatttgtccacatgtggaaaccaccagaaaccagtaaaaaagaatgggaagtgaccaaagagcagacagaaaataccagttgccctagggagcacccagctcttccaaggactgcatgggtcctggtcagaggggcaagtgaaataccgcagctgcctcctgcagaggggtatctcttttacttgtgagcagcgtctgcagctgtgcaggctctcagcagtgcttagtgtcagccatgtcccttgatttatgctcgtgtgagcctctgcacatgtgggtgctccagcaggctagaggggggaggggtgccccaggtccccagaggcacagagctttttttggataccgagcctgagctgagaagcgtgggatgcaagagtgatgtcctgctccaagttcaaggaaagtacaaagtaagcggaaatgcatcccttcaaatagaggaaatcccaagttgcttttatgtttcccgttatagctgtgtgaagtcatatcttgaggtttagctttcacgttgagtttcagctgctttttatgtgtggcgtggtgaatgttagttttcagcatttccttatttcagcgtatgttgcctccgcactgattattgtcctttgttagtttagaagtcttgttttatccagagaaacagaataggaaaataacagcaattttgaatggcagcttcccctccttttatgataaaaaatacagcttctgtaaaaaactgcggcaagagaaaagaaagggcgtactgttgtccctggggataaaatagacaggagaccaaagactacatttctactgagcagtgcttttattaatgaattctggtagagttttaacagcagggcacgatttcctcctattgtgactcctgatgacctccaagaaataattcctgaatgtcacgctcataagacatttttctgattatgggcttgtaataattagatgtttatccctagaaaatattgccaacaaaaatttattaatagtgcaaaggaggtgcttatgcaccttattatgtaaattgttattttatattcaacatcattacaaacgtgttttgagagggctattgagatagatctccaagacatctgccgtaaaccagtacttggacttacagccagtgctctccacatctctatggtaaggagcattcaggtcaggaggtagaaatggaaaaccaggaaggtatttggtgattagtttgtgaagttagttgtgtcaagagcaaattaatttttttaataaaataagtctcagcaattttaaaaccattcatacaaaagaagcagagttaaaatggacttcacagtagtttccatggggattaccagaaggtgtaatgcatcttccggggaaagaagaagatggagggaagtagaataggatggggaatcgtagagagtcacagttgatttcaggtgccactcggtggcattactgtcattgtttacttccgagcatttagatctacagctagaagggactcagagaagacagacccaagaaaatcaccaaggaatttgcctgtgtataggactttgaaatggacacgtctccttgaaagtgccacgttggatgtctccaggcatggatcttgtctagatggcatttgcagttttgcatgctttgctattgaaatgttctagctaatgaatgtcttccactgcctgcctgtgtgtgtcaggtaatgcatctttcttcacagaaggactgaattcagagggtttcttgaagaaaatttaaaagctggtgatatctgcatagttgctttattttattttatttttgagatggagtcacgctgtgtcgcccaggctggagtgcagtggcgtgatctcggcccactgcaagctctgcctcccgggttcatgccattcttctgcctcagcctcccgagtagttaggactacaggagcccgccaccatgcctggctaatttttttaattttttttttatttttagtggagacggggtttcaccgtgttagccaggatggtctcgatcgcctgatgtcgtgatctgctgggcctcggcctcccaaagtgctgggattacaggcgtgagccaccgcgcccggctgctttattttattttattttttgagatggagtctagctctttcacccaggctggagtgcagtggcatgatcttggctcactgcagccttcacctcccaggttcaagcgattctcctgcctcagcctcccgagtacctgggattacaggtgtgcaccacctggctaatttttgtatttttagtagagacagggtttcgccatgttggccaggctggtcttgagctcctgaccccaagtgatccgcccacctcggcctcccaaagtgctgggattacaggtatgagtcactgtgcccagcctgctttagtttatttggatggtgactgtaactttaaacatattaatactgaacaactaaatatactatgtatgctgaaggatgctagatttttctaagtcagaatctgacagctttctcagttagctgctgtttgtcagtcctttgtgaacaaaaatactggtctacctcatgttaaggaaacgataggtgaaatgagatttatttaatcataccaggtattttaaacagccagctcttttttttggcaagctcttaatgttattaaaaacataatttgtcacttaagtcttttcagcatacatatagtttcttagtcatgtaattcataaaatagaatttagagttgaaaggaacctaagaggtcccttctaaatgtgtagatcttctgaacagtgtagaaattttcctccaccatgtctctgctggaggatattgtctgtggccatgcacttggcacctttcaaggcagccaattctagggaataacatttcttattggaaaatgctctgttggcctgattgttgctgcattttcccccttgttaattcatgtttgccatttagcaacacaaacgaagtctgttccccttcattcatgatgctcagttcttaaagctgagaacatgatggttaaggcagcacagtgaaattgccaactacttgccaaacaagtggatttgaaccagcctttgcctcatttctgtccttggcccgagggatttagaatccagcagaccgcaaccttcctccctatttcccctgtccatttacagatgaatacctggagataccacaagcttaaatgtcttgcctaaagccacacacattggcttggagcttagtgagtttgtattaggtactataagtgatttagagctgatttagagtatacaagaggttatatgcaaatgctgcgccatttcatgtcagggagttaagcatccttggattttggtatccacagggatcctgtaactaatccattacggatatggagggacagtggtacctctgaaggctgctggaggataaagctctaactcaagagccgtggatgtggtggtaacttggcagcagtctctttcccaaaggcctccttgcgggagggagggcagtgctcatcttaattttctggtctctttcctagactcaccatcattcctcagggaatcagttgattaattaacaaatgcttggctgggtgaggtggctcacacctgtaatcccaacactttgagaggctgagacaggaggatcatttgagcccaggagttcaagaccagcctgggaaacaaagcaaaacccccatctcttaaaaaaaaaaaaaaattagctgactgttgtagtgcatgcctgtagttccagctactcaggaggctgaggtgggaggattgcttgagcttgagagtttgaggctgcagcgattgcaccactgtattccagcctgggtgacagagtgagaccctgtctctaaaaaataaaaattatccaaatgtctaatgagcatctactgtatacctggtgctgcactgtgaggatgccctctaagagccccctgtgcggggagagagaggttgtataaaatgtttgcaaaggtggaaatggagtaggagacacatatgtgaggacatggggctgcagggaaggccttctcaactcctctcaggctgatggtgagttagagaccagccagggaaattgacatctgaggcagatctggctgagtccaccaggggaagagggtgggatggtggagggaaggggcttgaaggactgagtgtagagtcctttgtcacataggaagatgtccgtgctttgtgagcaggcaggagtcttcgaaggttccaaagcagggaaatgacataagactactgaaggccaggcatggtggctcacgcctgtagtcccagcactttgggaggccgaagtgggtggatcacgaggtcaggagtttgagaccagcctggccaacatggtgaaaccgtgtctctactaaagatacaaaaaaaaaaaaaaaaaaaaattagccagacatggtggcacatgcctgtaagtccagctattcaggaggctgaggcaggagaatcgcttgaacttgggaggcagaggttgcagtgagctgagattgtgccattgcactccagcctgggcgacagagtgagactccatcccccacccgccccccccccccacaaaaaaacacgactgaaaatacttggaaatagtctccttaatttgtttttttttgttttctttttccaccaatggtggaattcggatgggaggaggcttctaattttctgctcacaatgttgttccttcactagtttgaagattcttctgttgtgaaagaccaagagaacatatgattagttaataggagctgtattctatctgtagcttatctcttcctggccccaaatatagcttaaaaccttgctgtccttcctctgcttactaaaaaaaaaaaaaaaattgttcaagaacttcagctaattctggatttgtcttctgacaaagttccctgtggttcataccacatttttgtttcctccctggccatgtgctggcccctgaagtgtttagatctgctgttttaaaaactgagctccctagccagtcagattaattgctttggatcatgccattctgtctttctcagattgtcgtatgttagtgtctcctgtgccacataaatagtaatctcttgtaggtgtctgaggtatatttttcttggacttgtcaaaattagttctcagagcttagagatggtgtcctgctgggtttattgttcccttgtcttcttgttactagttccaaaattatattctcactttcttccagggttcttggctgcctaactgatcaattcttttttggtcagagttatggatgaattttattggcttcgtacttttccaaaatttcaaccatgagcctatagggttgtatatataaatttttagtagagacaaggtcttactgtgttgcccaggctgatctcgaactcctgagctcaatcaatccttctgccttggtctcccgaagtgctgggattacaggtgtaagccaccatgcctggccatatattactttgtaaaatgaacaaagttattaattgaaaagcatgaaggtggtgaggatgatagctttgcttattgctttttcagaggtgggtcaagagttcttatgatatgtcttttaaattctagaataatacctacagatttctctttacatcttgattctgtacaaatttgtgtggtttaaaaaaatgagagagttctctccacttctttggtttctttaggcagtaagtgacaaactctcatagcaatacttcatctactttgctttcctttatatttgcacccaaatttcttcattctctcacgcatatatctcttgtagtagattgtttggacaaagggcaccttgaactggcagccttgcattctgcttgcctgcccaggcttggtcctgtaaggagacttgtcctttctttttgtttgttttttgagatagggtcttgctctgatgtccaggctggagtgcagttgtgcatcacagctcactgcagcctcaaactcctgggctaaagtgatcctcctgtctcagcctctcaagtagctgggactgcaggcacacaccaccatgcctggctagtttttttgcagagatgaggtcttgctttgttgcccaggctggtctcaactcctgacctcaagcgatcctcctgcttcagcctccgaaactgttgggattacaggtgtgagccaccatgcctgactgatttgttccttttggtggtcaatcttggttcagtagtatataaatttagagtgctgctgtattttgagcagctgctctgtcatatgagcttgaaatattgggttctatgctgcttctatgttgtgtaagtctccaaactgaaaggatttgtgactttaaaaaatgcccacttttgctcatattttttgtttcctttatttgtttggcacttgttttcacagcggtgacttcagagcacaattactgagaaaccttgagtgttgatgtaaatcctccactgggttctactattacatacatcttcgtaactaggtaaacttccaggagtcactgaaatttggtatctgtaaatgaaaaattatatcaaatacagataccagtgaaattgctagatttcattgatgatttcagttcagtattctaaagtctggatgtcacttagtacttggcaggattgcaaagcaatgacatatgtgcatgcaggtagttttaattcaagccaattgtgagaaggatgttttattggtataagatcagtgtagtgttgagttggttgtggttttcaattgctgcttttgttttggttttaaattataaattagttcatttgtctttatcatcagtttacagttgcattgtgtcatgtgcatttaacttatactaattcaagtctcaatgtttgcttaaaaataattaacaatatgtatttttttcatgcaacatctccttaaatacaggccagatgcgtttcttctggtattcaaccatagaaacagcaatcccttccaatgctgcaggaaaattggcagggttaggctttgtgaaaggtaatgcagcactcagaaaaccacatgtgcttactgtgtgtgctatttaagtaattttcaaggataattttgtcttaaccttagccttgattttagaagccaagccttgcctaaaaggtgactccgtgcagtttgtggagagttctttggccagatctataggatgtagtgctgtgtttttagcatcagtagtgctttggagttataatttcctaataatgagaattgaagtcaggtatgttttgctgttaaaatatgactcatttgtgactctgtttctaaataggtgtgtattttctcccctctgtttacgtggtgatagtccatttttatcactgagtttgttctagtggaaagcagtagtgggtgagaaatgtggactgtgtttagtaacttggaaagccactggcttaaagtaaagcacattttatttcccagaggtgggagtccttgggggtagtgataatgttggtttacttctgaacatttatccaactaatcagtgatggaattaagtctctattattctttcatattatgaaagcttctaattgaaaatgcaaaacaattatgaggcactttaaccccatcaagtttatgagaagaacattaagtgcctagtggatgtttgcccaaaggacccaagtgggcaattcacaaaggagggaattaaccagtaaaaagccacagaaaagcaccgaataaacctagtcttcagagactcaaaagttaaaatattatcctatatcctgttaaattggcaaaaccaaaaatgattaacatacctgacgctgcaaagtcacagtggcctggtgcatttggacgttgttggtgatgttgtgtaaaagactgcatcttctcggaacagcaatttggcatgattatcaagatctacaaaaatgttcatgcccttgcagtcctctgtaatacttgttatccctagggaactgaaattatgggtaaggatattcagtcccacattatttaatttccgaaaccattagaatagcttcagaagttcaacaagaggaaaatggtgaagtcagccacggttattcattagaagaaacaacatagagtctatatagcagaatgaaacatgcttgtactaggccaagtgaaaaaaggtaaaacattaaatgaacactgatgagaacaaggttaaacatgttataactaacataatatctaagtgttattagttgtggggcaagcgtttatagatgtattttctctttttttgtttataattaaattcctcatcaaagtaaagagaacattaaagaattagataaggctatggtaggatgaaaatgagatgctgggatgactttgttttaaatccaaggagatgtgtcagctgtttttggtgtgccgtgtggttctacaaactgctcatttgctgtgtaaatggatgtagctttccaagatgcctgggtatgaatgagaagtaattttggtaaagtaacatgttaagggcatattttaaagttcacattccatctgctgagtgttctgtatttgcaaaggtatttattacaggctttcttgctccgttgagaatacaagctatagaaccatgtagaaatagttttttttttttttttttttttttagatggagtcttgctgtgtcacccaggctggagtgcagtggtgcgatctcggctcactgcaacctctgcctcccgggttcaagcaattctcctgcctcagcctcccgagtagctggagttacaggcgtccaccaccacgcttggctaatttttttgtatttttagtagagacagggtttctctatgttggccaggctggtctcgaactcctgagctcaagtaatccacccgcctcagcctcccaaagtgctgggattacaggcgtgagccaccatgcccggcgtgtattcctcattttaaagctttagatcatttgtatttactttgatttaaagatactgtcttacatttgatattgtcagttggtatcaacatttaaaaacaggtttacaattgataatgagaaaataacttttattcgaggaatgcaagtccttttattttttatttgtttttgagatggagtcttgctctgtcacccaggctgaagtagctgggattacagggggccttgctaattttttgtatttttagtagagacgggctttcactatgttggccaggctggtctcgaactcctgagctcaagtgatccacccgcctcagcctcccaaagtccggggattacaggtgtgagccaccacgcccagtgagcttgggttttctgctatagaactgaccagggcattctggatttgtgagtgaaagcaggaacccctggaggggtgcatcttgcattctgcttgttgggcgagatgaatgtaggccactctaccttccagactgcagaacttccttggtatttacctttgtgaaagggatccacaaatgactttttacccctgccaggggttgatggaagttgtttccaggtgtgacccatcttcattggcttatcctggcgagctgttaggaaaaagtgtcattttaacttgctgtattcctctgaagctccagaatacaagatctgagctcactctgttgaaaaactcctttgtttctacctgaaagcacaggatgttcatttctatcagatcagttcttttctgtataccagcctgaacatgtgtgtgtctttgtctaagcacctcttgcttcataagatacaccaccaaattgaaaagagttagtgacaactgttccttggctggcatcaaaaccagacaccaaagaaaagccagcaagtaattttgtaagactaggtcgggctgaccgacgtcatttttctttctcagttttgtgtaacttttctgttttaaaaaattgttttgcattaacacgctgacagaaatatgctgctaatgacatagtcatgatcttgatgatggtgataataactgtagccagccttccttcactctttgctccccatgtgccaggcactatgctacacgtgggacccctttaatctcacagtgatcctgtgtggggggcatagttgttgctgttacctcagatgaagaggggaggctgagcaatgttgagtcaaaccacagggacaggcagagccacgttctgagctgcaccgtctttcttcctgatgtaaccattgtgcccagcacatttagcatcaccatttgctttcaaaagccagaacattttaatcagaggaatgcaaacttttaaaagacattatgaatttactttttgtgcagtttcctgatgaaaatcacagggcttgcatgttttcaagtgaccaattttaatactaggttggtattcttccttccctccttcctcttgtctctccgtctttcccttttatgtcttccatcacagggagttctgcatctccgttgcagaacaaccctgtagacttttagggttttgagttcccagaggagcatctcaaagcctttccaaatccaatgatgtcagaccttaaagatcacggggcccagggctggcaaatccatggcctcactttgctgcccacctttccgggtctgtcatggaaactgagaacagggcacatccctgtctggagtcttggaatctctacatcattgcaggtgatacccctaggaaactggaacttaagatacaatttatctgcctttcctaatttactctgaaagcaaaagttctagattagattcctgtggtccgtggtgggagagtcatctgtccaaggccacataccttgtaagtggcaggtgagtcttgactgcaaggctagcgttttctgctctgccgggacaccttgattttctcagaatgcaggtccagcgcaagagtttcctgctcagaaatgcccatggctccctttcacttacagttcttcctgaccctcagggcctctaggatgaaaagtctgggagcaagttacttcatcacatccagataacccttttatgtgcagggtgtttggttggaggtgctgccctcaaggcgtttacaggctagccgagggctcgaggtgtcatctccgtttaagaatgcttagaataccaggcaaaaagtgatagttttaatcagcagtaagaagtgcttttgcagttcaaaggtgtgagatgatcatggattggccataaccaggaaagacttttgggaggagatggcattgactagatcttcatagaaggacagatgtgtgggcatggtgactgaaacagcatgaagggtgacttgtgtctaaggagcaggaaacatttggctgggtgatgtggtctgcaggcagaagataaggctaggaaatgactgtcccggagggtcttggatgaagggccatccgctaatactgaggaagtcattgggagccagtgaaaatttttgagcagggaaattggggctgtattttaaccagatggagctggtttgatggtaagggtgtactagagaaggggaaccccacattctgaattaatgtcacttaggaaaggaccccttgtaagtatgaaatggttataattgtgtgtgtgtgtgtatgaatttgagaaaagtgtataactgaagaacactaggtatggttttcttgtttttttttttgttttgtttttttgttcgtttgtttgtttgtttgtttttttaaagacatggtctctctctccctctgttgcccaggctggtgtgcagtggcatgatcacggtcactgaagccttgacctcctgggctcaagtgatcctcccacttcagcctcctgagtagctgtgactacaggaacgtgccactatgtgccaggctaatttttgtattttttatggagacaggtttttgccgtgttgcccaagctggtgtcggactcctggactcaagtgatccacctgcctcagcctcccaaagtgccgggaggtatggttttagacaaagaaaaaaaaaattacagtaatgattttcacctggagaggataaatgggaggaggtgggctgaattcagggctgactgtgttttttggcagtgtcgatttggtgttcagttttcagaggcattccgttaagccatttggaggcagtattttaagtgagaatgtggctataggggtgggcagataagcttgtgactgattcggtcagggtgttggtaggcagacctagccctggtggtcgccgtaccggtggtgctcagtatccgtggaggtctgccagcatcctagaagccctgggggttggctgtgccatcagccctgtgcagacagctgcaaagcatgacttggggcagaaggggccaccttgtttatgtggagggtgaaggtttgctgacagtgacaccagcttgagattgagagacggtggggtaatggaattcattcagttttggcaggaggcagaagtcaagggagtttattgatccgagccttgagagggcgggtaatgagcagtgtatcttaggtgggctgagcggtaaagtttgggcaccgagggtgacgtgaactggagttcggcgctgggaactggatattcacctcccttcagagctctgtcaccatgcctggggtggagccgcaccctgagtgcgctcagcagggagtggcatgtgtgcagggcttcagccagggctggcagccaaggaccaagccatttgcctggctccaccatccagagtgcagagaagaaaagtgggccagagccaagtaagttttcccttctctttttcactctgctgtgacaccctcagagtgttgagtaatagggcttgtgaaaggaaaataaatcttgggggccccaaaatcactaagcagggaaaaggcaagctgggaactgctcagggcaaacctgccgcccattctattcaaagtcacccctctgctcacagagataaatgtgtatctgattgcctcctttggagaagctaatcagaaactcaaaagaatgcaaccatttgtctcttatcttttatctacctgtgacctggaagccccttcccaacttccagttgtcccgcctttgcttcgagttgtcccgcctttgcttcgagttgtcccgcctttgcttcgagttatcccgcctttccagatggaaccaatgttcatcttacatatattgattgatgtctcatgtctccctaaaatgtataaaaccaagttgtgctctgaccaccttgggcacttgtcatcaggacctcccgaggctgtgtcacaggtgtgcatccttaactttgacaaaataaacttcctaaattgaccgagatctgtctcagatttttggagttcacaggctcatgtatggagaacttggacagtagaatatccttagagcactgaagtctagttaagtgaggactgacaacgtaaggagatgttgaaaaatagtttcaaagaagaaaaaattgcacatatgtttttgaaaacaaactcatgcttcttatagaaagattagaatctcattgcttaacatttatattttcatccctttaaaaatctcttttttttttgagacagagtctcactgttacccaggctggggtgcagtgtcacaatcttggcccactgccaccacagcctcccaagtagctgggattacaagggtgcgccaccatgtccagacaatatttttgtattttaccgtctgtactaaaaatacaaaaatattagcccagggtggtggcgcgtgcctgtaatcccagctactcaggaggctgaggcaggagaatcgcatgaacccaggaggcggaggctgcagtgagcccagattatgccactgctctccagtctgggtgacagagcaagactccatctcaaaaaacaaacaaacagacaaagaaacaaacagaagaaaggctgtaattgtatagtcccaccagcataccaaagtctttttggaagtaacctctcattagctcaattaatgaggttgaattaaaaagtcacggagtccgtcaggctgctgagtgttctgggcactctgtgagggccagttaataggatgtgcacctcctgagctgtgttcctttctcccctaccctgagcacacgtttcagaggaacatggcgagttctcaggtagcgacgcttcccagctgctgtgccatcaggtggcactccacctgtccctctctatctcgtgatcttgttttattttcttcagcgtgtttcttactaactgaaattatcttacatgtttgactttgtctcattgcctagactcccagctctgttaaaacaagcactttgtttttctagttcatgctgaatccccagccttgggcccatagtgggtgctgaatatatgttcattgcttgaactccagagggtttctgtagcctctgtctccagtttgccccaagccactgtctcaggccatctttatgaatgacactgcaggagtcctgggcgctgcagctcctgtttagggatgtgctgcttgtgggacctcttctccctgggatgcctcctttctcgctgagtctaggtctgaggacatgcggattctttaggacctaactcagttgctggtttcttccacaaaacctttcctaacatcctaacaggctctagtgcttgcctgtttgagcctccgaaagtcactgtggttatcttaaagatgccttacaccacgttcctgcgttgtaattgtgtgcatagttgtctgacggtaggtccttttgagtcagggagtcccttgaattttttcctcaaaggcctttgtttctatacccctgctttttttcctcctctgaaaattttctcaacatctctcatcttagatcttctgggtcttttttttttttttttttttgtcaattaagtattttaaaaatattagagctggtaggaatcttggctgatgtctagtctcattagaatgtgtatctgtactgtgatttttccattaacttttgcctcaggagtttcgaatcagctttggggctagtagcaaatgtagataattgtttcctgattaggagtcagatttgacacttccttattgaaatgttttgctgtctgggatatgaagcagatggtagcttctggcagagcagatgtctgtgttgaatcagagtattttaaatctgctcttgtaccttgaagtgtttcccttggcaaatacccacttctgacctgctagtgtcagctttgggtgatccccccacgtcccccatacaggattacacagatccttactaagaagtctgataaaatacaagtaataaaacataatttagtattggttaatccatgatgctttattctgatgcaagtacaacgtgttgattgacttggtaaccagtgaatcattaataaatgcactgttaacttggactgttgattcataacactaaaaggagtaatttcaataaaagatagtttgattcttcagattccctattggggtggttcagagcacagactgtaggtaggctgtctggatttgaaattcagctctgtgtaatctttaggcaaattacctaacattgcagtacctcagtttcctcatctgtggaatggggtgtgtgtgtaataatagtacttacttttaggattgaatgaggatcacatgagttaataaatgaaaattgttgagaatgttccgtggctcacaatccctgcagagatgttagccactttaatactaccattaaggtctcttcttccttctcctctgagaaataagcgcttaacgatatcactgctcctgtttttagtacaaaggctggatgaagcccaaatctttttttttttttgagtcttactctgttgcccaggctggagtgcagtggtgtgatctcagcttactgcaatttctgcctcctaggttcaagtgattctcctgtgtcagcctcccgagtagctgggatgacaggtatgcaccactatgcctggctaatttttgtatttttagtagagacggggtttcaccatgtgggccagggtggtctcaaattcctgacctcaggtgatctacccgcctcagcctcccaaagtgctgggattacaggtgtgagccactgcacctggccgaagaagcccaaatcttaagaagaaatgctctactcaaaaccatgcctggtttatgtaatgtggctttctttctcctgagctgggggttgcactagctgttacctgggacacaaatagtatggatggaatgctataaatcggaagtatgggtttttggacatcttgcttagatttgagctttcacccttaaactttgtatttttctttggacggaagtattggataaaggtaccagaaaatcagtgcgttgaatttgaactgtatctttttgggggaaggggcaggtgtgtctttctctcaatactatgtttacttttggctctcgtataccaaaaggaagggaggatgctaaagtctaatagttggcaaatagctgtctttcctgctgtgggtggcactgagaaggatgagacctaatcctaacttcgtaaacttttcatcttataggaaggtgaagtacatagattatggacagtgcaggctgtttatgaagataaatgttttcatcttaacagtactttgagcactgtgtgctgggctaatgagaaacacaagacagccaggtgcttatctataagagctgtctcagaaaaggtggttcagagccaacttgtgagggaaaccctgctcccactcctgggctcagttttgccttcattttctttccagtcaacagttcccaccatttacctcttagcacactacccttaacacacaccaagctatttttttttttagtaatgtttcattatggaaattttcaaagtaaacagagagtagaataatgagcactcaggcacccaccactcagctccagcagctgccggcacagacacatggccggtcttgtttatctgtaactcccttccccacttcctccagtacctgctggattagttcaaagcaaatcccccaaaatatatcatttttcctatagattcttctacatgtatcactcaaagatgaggaaggactcttaaggaattctattttaaactgtattttccaaccaccattttttattcaaggagattgcattcattggctaaagtacgtaggcgggccataacatgtcaggtgagtgtataattaggagatcttatatttaatgagcaccctgcatttagaatgccttccttcagaagtttcaaagaaatcctaggttgcccattttccttaaggtcttgcagacaaactcttgttgattaagaaatttctattgggtttcttgagaatcataaagctgcaataatatatgaccagtgcctgggtcatcttcccaactagcatgcaggacggtgatgcaccttagtccttgaggaagccaggtatgagcagtcccacggtgttgtacaaattccgttttctttttatgccattgagtataaaagcttgggaaccagtgcctatttattggtaaactaagtgaaaatccagtgacttcactgacatatttggatcttattagtatatggctgggaggagattaagtcatttgaatttatttcaattctgaaaagaaagtgctgcctaaaaattattatagtatttgggaatatttctacccagtatacatggtggcagaaaatcacataatctgtgttgtggcaaaagcattgaataggaagccaggagatgtgggttccagtacccacatgccgtctctcctgagtacccaggtggccgtgggctagacacagctgcaggtgtctagtttgtaggtgatgggttagaaatgggctgtaaatgagatgaagattgctttggccttggtggggtggagtggtgacatttatccttaccttaaagctgataagttcatggtgatggttctcagccccatatgactcaacatctctattttttcttttaattttgaaataattacagatttgcaggaagttgcaatgatacagggaatgaccctgtgtctttctcccaccttcccccagaggacacaggttggcaagctgatgcaggtgggtggcattgccacttaatatcacagacaaccttgctgcagccctcagctcttcaaaaatagtgacctttccttagaaagttactatttcaggaatgcattgcccatgcactgtcaacactgggcaaaaatactttgtgtttatgagctcaaggctcagaaaattatagacaaatttctgacccgagtgtctggtgggacctttagatattgaagacaatttcttccttttgtgggactgtcccacacattgcagaatgtttagaggtccttgacctccgccactaaataccagcagtgacctccagtcattgtgacaacaaaatttccaaaatgtcctctgggcagtggttctgcccctttaagaactactaagatggtgaacaaatacgccttctgatagaatctgtccctcagtgcccccactggcatgaaaattctcagtgtatggagtgttgatttgaatcatgtgataatgttgatggtctgatgtacaatgtttcttattcttaaaacataccaggtgtgtattatatttgcaaagtaaatgtagtgcttctagtggtagctggtaggtttgctggtagctgaatgtgggaaccctagaagtcatgtctatggctcatcttcactgtgagtgcagagtcctgccagcccagcacaaatggctagtgtttcttcatcagcaacagtcattttccccgactcccagtctccaatacatcaagactattttgtggaacgtaagagtttttgtcaagtatttaacatcatatagatagagccttttaaaaagtaaacttttggctgggtgcagtggttcacacctttaatcctagcactttgggaggctgaggctggaggattgcttgagtccgggagttcaagaccagcctgggcaacctagtgggaccccatctctacaaaaaaaaaaaaaaaaaaaagtcaggcatggtggcatgtgtctgtgttcccagctgaaggctgggatgggaggaaggctgaggtgggaggatcacctgagcctgggaggttgagtctgcagtgagttgtgatcgtgttactgtactccagcctgggcgacagagtgagaccccatctctctctctctctctctctctctgtctctctgtctctttgtctctctctctctccctctccctccctgcctctctctttctcacacacaaaaaagtaaactgtttagtaaagtgggttgataaatgttttagggttttgttttagaacctgaacctattgtaggagtgacctgggtgactttcaggtttggaaacagcattagagtttctatttatgtgattttcttttttaaagaccaacttatttcaatgtcaataaaagtatgggtgtaaactagggcttcaaaatagcttcgtgaaataaaattgaatgctcttttgtggctgtgttcaaatcacgtatacctgtatttatattttatatatatgtatttgtatttatatctatgttatgtttatatgtgtgtaagcactttttctaatcccatccttgacacatcatcctccctggttcgtttatcatgatatacataatttttttggtggctgtactttgttcctttaggactcatcgttttcttaagtagaacaccatagccctttctttgtagaagtatagtgcactgcagaacataaaatactacaaaaagataatggaaggcaggcatttgtctttgcttaacattgattctccagggtaatctgctcattttaatcatcaagggaggaatgctgaatcattttatgtgagttagtagaagaaataggccattatttgccactggaaatctcccaggaattttataacttggctatatttctaaaatgtttcactaattactttttaggactgaaaaataatcaatctgatttgttttgttttaaactagcctagataccagaatatgtgtataattttttttatgtttgaaagataatccaaatggggattccttttattttttgacagagtctcgctgtgttacccaggctggagtgcagtggtgtgattgtggttcactgcaacctcagcctcctgggttcaagtgattctcctgcctcagcctcccgagtagctgggactatgggtacacgcaaccacacctggctaatttttgtatttttagtagagatggaagttcaccatgttggccaggctggtctcaaactcctgacttcaagtgatttgcctgcctcagcctcccagagtgctgagataataggcatgagccactgtgcctgaccccttttgtttttttaaggctaggtacttgaatatatttgtgtttcaccccactttttttttgtttttggttgaattttatgtccaaataatgttatatgttctgtgacaggatcatatataaagaaatatattaattatccaatttaatttaatttatttattgcagtataacacattatcccaaaacttagtggtttaaaaaacagacatttactgactcatagtttctgtgggccaggacttgaggtgtgtgttagttggatctccacggctgtctgtctcaggttgcagtcatctgaaggctggagcagggctgggcattctgcttccaagcttattcaggtggttgttgacaggaggtgtcaactcctcaccacatgcagctcctaatctgagagagagccagtgagtgcctaaaacagaaggcacatgctctttataaactaatttggaagcaacatcctgtcacttctgctattatattagaagtagaatggggctgggcacagtgcacatgcctgtaatcccagcgctttgggaggctgaggcgggcagatcacttgaggtcaggagttctagaaagcctggccaacaaggtgaaacgatcttctctattaaagatacaaaaattagccgggcatggtggcaggtgcctgtaatcccaggtacttgggaagctgaggcacaagaatcacttgaacccaggaggtggaggttacagtgagcagagatcctaccactgcactccagcctgggtggcacagtgagaccctgtctcaaaacaaacaaaaaaagtagtagattgggaccaggcataatggctcatgtctgtaatcgcagcacttttggaggccaaggtgggaggatcacttgagtccaggagctggagaccggcctgggcaacataataaatactgtttctacaccgctgcgctgtcccccacaccccgcctgccaaaaaaaggtagattggggaggggtttacacagagacataaaaaccagaagatagggagatcattttagaggctgcctcccacattgagattacttacataatatagttggctaagattggaattatactaaacttgttgaaacctatatacctagtggcattgtgaaagattttgacaggtaaagtcatgtgcaaatacgaataaaggaattccactccccaaaacgaagtatttttagattcataagtgttctcagctaataaagtagacaaaaatcagaaagcgcagcagtatgtgcagagcttttcacatgatattaaaaattaagccataaggcagtttgtctcttattccacatgtggaataaagtgacttgtgaaatgccatggtgggtgcctttattcaagaatcctcttcagtagtatttttaccgcagcacacacgttatgctggctgaaatccttgtgcgtagcatgttgcctgctgaaaataattctgccttggccttaggcgatgtgctgttgaattggctgcctcaaattgtccctctcacttcctgttttatatgaatactttttctttgctctcttttacttgcttaaaatcggaatgtttgattgctatgtgcatcatccttcagtgaaatgtttgaggtggaaagttctagaagtttctttttcccttttgttgatgcgtggaatagataccagtcacttttagaaatacttgggtggttctagctaaaatgtgatattctactttagcaaggccacttgtgaaacagttctcaagagcacagtgtatctagtaagtgcttactcattgattaaatattatgtacattgtttttcttctaatgtgataggaccatttaggacctaagtttaaagatttacacgtgtgaataaaatccgttgcataccctgttctgagccagttttctatgccgtagtatatttctttggttcctattagaaaaaaaaaagtgcttcatatccaattctcattgagttgtatctattctcagtattgagtttttttttctttttttctttttaaaaaagtttcagtattgaattttgattactggaagccatttaattttgtcttcatttattttagttttcatttatcttcagtgcctatgattctgtagctttttccttccgcctctttctattctttttgtgcagcaaaaatcatcctccatgtcatagtctttgtttgcataacctgttctgtctgacacaaccatctatcatgacctaatttagccgtttcagtcacacctagtataatttataccatgggggaatttcctgtgctgttaaaccttccttgtcatccgtcaccaacttaaggagcttccaggtgtgccctttcacagggtgggcttggacttttctagttcttgcattttaggtaggagctgttctcaggaatttttttcttctgtgaatgagtaaagtgaaattaatccaaactcagtgcttccaggattaaaacacatttccatattacactgtctgtaagttgaagggccttagtgcttgagtgccccaactagaaaatgactcatcatgaggtgtccttctgtagacagtgtgacgtgataagaggaagaaggaaattgtgggcaacacagtgacttcccagtgacaattcacttgcctctcctaatatccttcattccaaagctgctcttctgcagatggttatgaggcatagtgtggtggagtggaaagactttggaataatgctctgccactttctagctgtgttatttggaaaaattgcttacctctccctgaacctgggtttccttatctgtaaaatggggagcatactacctttcttgaagggatttgttaaaaagaatgtgtaaaataacatatagcagtggcatgtggaaattgttggatactccaaaaaagttgatgtgattttaaaactttttctttactcagctaatgtttatcctagcttttctcatgttagtactaagccctgattgcatgaggttttcttaaagtggcccatgtagataattatagcattttctagcatttcatagtttaggccaatattggattacagaatgaatactttgagtgcttgcaaaggggtcaggaacagatgcatttttaggagtatcaaagtctgccaataaggaagctggtttaggaaattaaattatatgcccaaacattttatgtctacagatgcaggtttatctagaagagaggagaattttctaatagtatactgaagcatcatcagcagaacccttccagtgcaaggacaaaatggggcatcgtttactctgaattttatgaccagcggcagaaaaatgtgtcactgatgaggttaactggggaccagaatcctgggcatggtcctagttggcatgagtagaatttgcaatggttttcaggatgtattttcttcttttttcttttcttttctttttttttttcttggagacaggtttcgcccagtggcacgatcttggctcattgcaacctctgcctcccttgttcaagcgattctcccacctcagcctcccgagtagctgggtttataggcgtgagccaccgtgcctggctaatttttttgtatttttagtagagatgtggttttgccatgttggttggccaggttgctctcgaactcctggcctcaagtgatctgcctgccttggcctcccaaaatgttgggattacaggcatgagccaccgcacccggccaggacatgttttcttaaagacaatttaagagtcaggaagtggaaaaggaaagacaggtagatgaaggacaggctgtagcatgtcacacctcacagttatttgcaactttctgttaaccagatactgtgttagatgagaataagaacttaaattttttatttttagtgctgactagtaattaactataattttcagtcatgatcactgtgtttgaacctcctgtgcagatattgtggaaatatgtattttagatgtgaggaagttctaatataaatgaaggctctaagtaaagaaaaagatgcaaaatgctgtcatagacttcgaaaacagatttggataaaaaacattgcacctaccagaggaatcaaggagaaatttttcctcacagatattcaagacattatgttatttatcttgtttatgactttagaacctttttttagggggatgacagtaccttttggtgatttgagtctaaaatttgaaactaagattcatgcagaaaagtaaaagaagaaaattttcggagaagaaagcagtggttgaaaaatctgttagcagtgttcccttttgtcttttcagcctgttcaccaggaactcggagctttgcactgtgattattttattggttcaaaggacagagattgtctttaaaatgatgaatggctttgattatgtgtagtggctcacacctgtaatcccagacttaaggaggctgaggcgggaggattgcttgatgctagcagtttgaggccagtttgggcaatgtagtgagaccccatctctataaaaagtaaaaaaactagtcaagtgtggtggtgcatgcctgtagtcccagctacttgaggctgaggcaggaagatcacttgagctcaggcgttcaggactaccactacgccacagcctaggcaacagagctgactctttttttttttttttttttttataagaaaaaaaaaaaaggtgcattggctgggcgcggtggctcaagcctgtaatcccagcactttgggaggccgaggcgggcagatcatgaggtcaggagatcaagaccatcctggctaacacgctgaaaccccgtctctactaaaaacacaaaaaattagccaggtgtggtggcgggtgcctgtagtcccagctactcaggaggctgaggcaggagaatggcgtgaacccaggaggtggagcttgcagtgagctgagatcgtgccactgcactccagtctgggcagcagagtaagactccgtctcaaaaaaaaaaaaaaaaaaaaaggtgcatttttttgccatggggagattggaggagggagggtgaggggtactgccaacctgtacagtgatttcaacccagattagcatcctagcccctctctctgctggtttggtttaacaacttattgtaagtttggtgctcctgtgtgagactagagtaaaggaccatgggcatcttcatggttgttgggaagctgttagtccccagaactagagcaagtggggccagtaggtacaattctcagatatggtggcctttgaagcaggtaagcacagcctgtcttgggccttaacattaatgcctgtcttgttgatttgtcattatcattttagttttgtaattggttgattgagacagaaggggaaaaatggcaaaaaaaagcatgttatatatgcttaggatggaatgttttctttttcccattcctcatctcaattcccagtttaatgccaaatctttgagtatccatattcttgaggagagactgttcttggaaatcatttgatgagaaaactgctgagaagctgatcagatgccaacatcagagggcagtttaggttatctgctaactacaagcagatccagatcctagtagcactgagcatagacagacaccaagttatgacctctcaagttgctagttgagcctcatgaaaggaagatttgctgtgggagggcatacccttgcactgggctcttgtgatcggcccagcaattctttttctgttattttttttgagacagagtttctctcctgtcacccaggctggagtgtagcagtgcaatctcagctcactgcaacctctgcttccctggctcaagcgattttcctgcctcagcctcctcagtagctgggattacgggtgcatgccaccacgcccggctaattttttttttttttttaatttttagtagagacggggtttcaccatgttggccagactggtctcgagctcctgacctcaagtgatctgcccgcctcagcctcccaaaatgctgggatcacaggcatgagccaccgcgcccagcctcggcccagcaattcttcttgaagctgtcagtcatcctttgcctcattgaaaatgtcgatttttggctcactctgcctgttttaaggaccttggaaaagtgacaatctcacattgaccaaaactttccatttgctcataagctttaaggacttcttacacgtagtcttgtgtccttgtggtcaaggatgtaggtccctgcttataagccccacctcatgttctcatcactgttgacatcatggctttagctgaagtgtctctttctgttattagttactcataaatgtcgtttattaacaggaggaaggttattcttagaattatttctgatgaggtatttgtatgtgtatagtttaagtcaggggattgtctgtaatccaacgcagtctgaaatagtttttggaggttggcatagtttcatttcaccctgtccaatttgttcagagaagcctggaatttttacatgttagtaaaagaaagaaaatctgcctgatttaaaaattagtggcttttaacaattgtatctatgatatgaaaaggagagatttgttgcaacaaaagactttctattaataaagtatttgagtattttctgtgtagccatgtgggtgtgtacacgataggtaaatgtaaaatatgatccttgcttttaaagaacttgcttatttgggaaagtacaggacaaagcacgtgatgtttcataagacgggttgtagaaagagctacttatgacttgaaagtgtttttattggtaaggtaaatagatgcttgtatgtttctcaataaattaatctagcagtataaaaaattccaggccaggcatggtggttcatgcctgtaatcccagcactttgggaggctgaggcaagaggattgcttgaggccaggagttcaaatccagcctggataacatagcaagatcccatctctacgaaaagtaaaattagccacatatggtggcatgtgtttatagtcccagctattcaggaggctgagatgagaggatcacctgacccaggaggctgcagtgagctatgactgcatcagtgcacctccagcctgggcaacaaggagacgatgtctctaaaaaaaaaaaaataaataaaaccagaattccatatgttgtctgatctacgatgactatttttgttttttctacgttatcataaaaaacacttattcaggggaagccactttaaaagtatcctagatgagaactgtgtgctcctttttgttttaaggttgtgtgttctcccttgtcctttccctgactccctgcatactttgagatggcttgtgcagccccggcttttgcttggcatactcttcctgtctgtgattctctgcttctctccatggctggatttgctggtctagagatacaagaagatttgaaacctatgtcctcttggattttattaatcaaacatatgcatgtccagaattcacacaaccctctgccatgccctccagggatgggctactgggaggatatttttatcaataagtaggctaaatatttatttttatcccactgggtggtttcacaggcatcagcaaaatacaaaattgcgttattcaccagaacatgagctactttctgtgttgtccatgtggcaaggtctttagaaatatttgtgtgggcctttgccatgttaaatggctgtattccaaggcttcatttgtggtggtctagtcttttgtaggaggatagtaaggacgaaatgaattggtgtcttccagcagtcagatgtggcacacagggctcagggcttgcaccagtcgtctgcctgttcttcaaggtttgcctggagcttatttgccagcttctccaagggtgtccccagctcttagtttgcttttccatttgtcagtccaagtgcccttggggatagagtgtcatcccctttggctcctcatgtgggcatgtatgaagaagagagacttcgtttgtacacacagcaatcaggacccctgctggagctggagaatcgaggtgcttttcagaccaatcctgaggccctgtccttggaactgaaacaacaggctgagatgactgaagtgcattaaggaggaggctttagcctgctgccttggctgttttcttccattagaaaacatctcatgaatggagcatttggaaaaacaggtagttttagaaaaagagaatttccactcagactttgagaccaatctctgtaattgttttggtagggtaaggataggctttcttgaaacactagcctttagctgaggtattcgcacacagcccctgtctctgcataaggagataataaccccaaatcaaaggactgtcttctgttaattactaaattcccatttttccactttaagttgtgtggctggtaatagcgtccgccttctgatataagtcatagcatgcaacatgcactttgcaagtgcattttgcttgaatattttgcaaagatattctattgaattgagaggcagcaagtatttgatgtaatgattacacttgatcacacaaaaacacttcacagtgccatggctggtcttcatagtagtcagctcttgactttgcttctgtttttttttttttctccccacaagactgttagcttttgctgtggcttcaggagcatttacatgtcttaaaagcttataaataatataaaaggctgactgtgttagtagtgcagtagtcagtgcataatgccaaattggtagtgatgtctgcacgacatgctgacttgaataagttattttcaagttgtctcattaaggtttgaactggggatgggacagagatagcctttatcacatatttctttttaatttttatcttactttttttttttttaagctaaaggcaaaaagaatgcacatacttattttaatgtgattagaagatgagttgttccctggtaagcttgacccaccagtatgtgacagttttgcagcaaccttagaagctgggtttttctcatcccacagaaaacccccccacaaaaatacattgttattctgtaagaaaatatgactaaattatcatgtactgagaaaagcattaggttaacaaattaggaaaactatgtcttagatgtacaaccaactttacttcccgttctctggtgggcaggcctatacaaacctactcgcaaagtccgaggaagctgagaggctaaagaaagaggctcacaattccagtttctcataaagaaacatttaggttaaggtgaggtggcccaggttggtaatcccagcactttgggaggccaaggctggaggatcacttgaggccaggagtttgagaccagcttgggcaacatagcaagacctcatctctattaaaaaaaaaaaaaaaagctagacaggcatggtgacatacacatgtggtcccagctacttgaggggctgaagtggggggattgcttgagcctgggaagtcgaggctgcagtgaggtatgatggccccacaacactctagcctgggtcatagagcaagaccccatctcaaaaaaagagagaaaggtttaattgggacttaggaacagaagccacgtctgtgtctctgcactacccccagacccagggctgatacactgtggggaaagggtgactctgaagggatgtgtaggacaattaaagtactataatgtcaaggttgtttgacctctgggcagtgccagctcctgcaatagataaacgggaaatcttagaggccttcccagaactggggttaatcagaagtcagcatggcagattaatatctgagatggagttgctttggccactgcacctctctgtcttataagcatggagtatcaagataattgttattttgacccaaatcatcagcacagcaaccaattccatttattaggtaattatgtaccaaatacgaggctatttttttttttattacatttaatacttgtaacagctcagttgagggtattatccccattttgcagctgaatggatggacttaatgggagataagcagcttccctgagacacatcaacagtgtgtggaagtgacgggtgtgaacctggttctgtctgttggcaaaacctgaactgatctctatgcctcccactcctaatatacagtgtaagagagtgtaaataaaacatattcttaggtcatctgggcgcggtggctcacgcctgtaatcacagcactttgggagggtgaggcgggaagatcacttgaggtcaggagttccagaccagcctggccaacatggcaaaaccccgtctctactaaaaatacaaaaactagctgagtgtggtggtgtgtgcctgtaatcccagcaactcaggaggccgaggcaggagaatcacttgaacccggggggcggaggttgcaatgagccaagatcgtgccactgcactccagcctgagcaacagagtgagactccatctcaaaaaaaaaaaaaaattgttatgtcattaccaagaataatccaaattaacattaaaaatgcattaacatttataaaacttaattagttcagagaagaaataaggctccctgcccctaactcctcactcctctcctgtaaatgtaaacatgtaaattgtgccttctgtgttgctttcctgtcctctatagtcttagggtgtgtgtgtgtgtgtgtgtgtgtgtgtgtgtgtgtgtgtgtgtgtgtttgaaagagagaaagaggatgtaactgtaatggtactacaaatgtgtctgtagctttctagaaatggaatttcttgatcattttattttaaaaataatcactcttttctgcttttgcttgaaatgtcctattttccatagattaatatatgtttgaccttttctgaattagatatactgttttatttgtttttttctcttcttctgttttcaatcccaaactggttttaattctaaaaaggtacttccatatcgttttttgttttcataatttttgcgaattttctgcttttattttccaagcttatgactttgactcattttgccaaagtggacccatcccatgaaaacaacacaaattctgttaatttttaaattgagactgcgggttttgtgtgtgtgtgtgtgtgtgtgtgtgtgtgtgtgtgtgtgtactttttttgagagggggtctcgttctgtcgcctaggctggagtgcagtggtgccatcttggctcattgcagccttcgcctattgggctcaagggatcctcccacctcagcctcctgagtagctgggaccacaggcgcacaccaccacacctagctaactttttgtatttttagtagagatggggtttcaccatgttgcgcaggctggtctcaaactcctgaactcaagtgatctgccctcctgcctctcaaagtgctgggattacaggtgtgagccccactgtgcctggccttatatattattttaggagggaactgacatctttcaagtagttacttctgactatccaagaagtccatatatccggcaatacatattaaatgctctttcacttatcttcttttttgtcactttttaaagttctgtatacatcatataagttctatatgtttgctaagtatttcctagggatttaaacttaacattgctattttcagttttttcttattatgttttttaaactggttataatttatatatagtttattattttattatatattttttataaccttcatttttataaccttcaaaactaataatcctcttagttgtatattaattcaagttattttcttgggttttccgagtatgcagttttattgtgtgcaaataataacattgccccctttctgtatttgtagcaaacatttacttctctgtttaattgcactggctagcatttccagaataatgggaaataatcatggtgttaggaagcatctaactacatgcaagacttcatcataatgatttttggtgtcaggacatcatggtctaccataagaacatgtgactgctatatttacaattttggaaacagataaagggaaaataaaagcaaaagtatatggggtgaagtaagagaataggactagaatttggaaagtacataatggacaaatctagtgggaggaaattgaagttgatgggttacgcttcatgccgttagtatttaacagccagttgtgcatcaggtctgacaggtgctacaaagataaggaagataacatccactgtgaagggcctgtggcccaggggcactctgggtgttgatgagtacaactgaggggaacatccttagtgattagtgcagtggtagcccgaatgttataatgtgtcctgagttacagcgtcataggattttattagaaggcaccatcacccacctctactgctgcagtgcctgcactgcagcagggagcgggtgctcaagtctgtcttcatgaatgaagccacttcactgttccttgtggttcttggccagtgttacggaggaggtgagccaggcttttgctggtagagagagtgggagcagggggggatgctgctacttgaagagtttgctacagggggtttgattccagacttcagggcaagtctgttctgtctgaggtgtggagtgcttacagaggagcgaggggtgggaggggaggatgtggaggtgactgagaacagagcttcctttcctttctttttctttttctttttttgagacagagtcttgctctgttgcccaggctggagtgcagtggcctgatcttggctcactgcaacctgcaacctccgcctcccgggctcaatcgattcttgtgcctcagcctcccgagtagctgggattacaggcgcacgccaccacacccagctaattttggtatttttagtagagacagggttttgccgtgttggacaggctggttttgaactcctgacctcaagtgatctgcctgcctcaccctcccaaagtgctgggattacaggcgtgagccaccacgcctggccaagagcagagctttctaagtgatgcagcatggaggggttccggtggctgagatgtggattgcagcccttgatggctggctgacctagacacctcctcccgcattttctgctttttccatgatgttccggacagcaaagtggcttgtcatggtggtaacccccacgtccattcctgtgctccctctctgctccatggctgcctgggtttaggtctccttggttaggaaactgtcgtgtgaccatgcccagctacaaggggagcctggaccagtgagtacaagatttttacttttccagccgctgtaggcaaagaaaggcagggagagagagccttaggagtggatgctgagtcagccagttgcagtgtctgccccagaaccatcctataaaagccattttcaaactttattcattgtatgtgaacatgtttcaacatctttcacaagtggcttttaaatcgttgttagtcatggaagctttgattagatgaactcttgtgagggaacctggcatggtgggcataccacgacaccagctctcagagactcagatggagggagccaggctgggtgtcgtggaagccccttgaagctaagtgaagagggtattggcaaagagtagttgaaaatgaaaacttttcatttttagttgagataagatgtcagtaaaagttaccactatgaggatttggctttgcatttagcgatccatttttgcttttctttttttaaagtaggagaataatatgttttgaacatttagaaatggcctctttattgaaatacataaccttgtgtggtttgggctggtgcttagatcctcaagaagaatttccacatggaaaacgaattgccaccttagtcttctccaaagatgctgtctctctctagagtggctgtctgcagcccctgccgccccagctcccttagaatcgtggctcaaatgatattcctaattcctaaagctaaagggaaaagaaaaaaagccaaaaaagcaaaccagtcagaaaatgtacattagatttttacattgatttccaatgtacaaatttctgttctttataatcttagcagaagccagtatctcagcagaagcagaagcaaatatctttaattgaagatacttggtttccatgataagcagggtttccacaaaaccacatatgagagcaggaaccaatgctgctttctctgccttctaatccccgcagggaagggtcgaggagcagaaatgtggtgaccctgaaccccggcagcctgggtgtccactgcagaagtcagggtgtctcgcctgggcatggctgaaagattgttctccagctgtctagagggagacacggctcccttttagtaaaaatgtcacagaaacttatttatgttttatgttatttccaattgatttattagtagaagcaaataaattcctgtttgtcagaggagattcctggaaacctagaaacttaacacagaaaggaaattgggtatgtacatagctgcttttttgagcgtctttcataattttttatcatttaaaaagtagtgaaatcagtgaagttgacaattttcattacagatgcttgtgattatttctacttgatatgaagctggctacaagtttgggctacttatgggcatatttgcaaaagtacatagaatcttaaatttgagacatttgactttcatggctttaataaatgtgttactattttaaaatagtattaagaaattattattatatttagagacgaggtcttactctgttgcccaggttgagtgcagctgggtgatcatacctcactataaccttgaactcctgggcttaggcaatcctcccgcctcagcctgccgagtagtggtgactgtaggtgtgtgctgccatgcccagctaattttttttttttttaattttgtagagacagaatctcactttgttggccaggctgttcctgaactcctggcctcaagtgatcctcctgctgagattacaggtatgagtcaccgtgcccagccaagaaattatttttgatagtagagttattgtttagtggcttctttgtttcttaatttttttttcttttttgttttttgagatggagtcttgctctgtcgcccaggctggagtgcagcggtgcgatctaggctcactgcaggctccgcctcctggattcacgccattctcctgcctcagcctcccgagtagctgggactacaggcgctcgccaccatgcccggctaattttttgtatttttttagtagaggcggggtttcaccgtgttagccaggatggtctcgatctcctgacctcgtgatctgcgtgccttgacctcccaaagtgctgggattacaggcgtgagccaccgcgcctggccgtttcttaattattttctaagaattactgtgccatttcctttacatagtatggactatagtggcgtgatcatggctcagggctcactgcagcattgaactcctgaaatcacttgtaatcccaaagtgctgggattacaggcatgagccactgtgcccagctacaattttttaagcaatagaaggcctgtccacattgccgagtcttcctttggtgatggttcatctgaggattgcatgcccaaagccctggagtgggaggcttagattcttatcctagcctttcctccaacagtcgacaccccagagcgtgtgtattcatttctttcttccctttcttctctctctctctttccctctctctttctctctctttccctctctctttccctccctcccttcctccctctctttccttcctttccttccttttacttcctttcttttctatcttttgtagatatagggtctttctctgtcatccaagctggagtgtggtggcatgatcatagtacactgcatcctccaactcttgggctctagagattctcctacctcagcctccgaatatctgggactacaggctcatgctaccaagcctggttgatttttaacattttttgtagaaacgagatcttgctttgttgcccaagctggtcgcaaactcctggcctcaagtgatcctcctgccttggcctcccaaagcactgacattacaggtgtgagccactacaaccagccttgtttttcttatttgtaaaacgatgaggttggttgctaggttattgctgttgatttttctggggtcaggccagagactgggttcctgggagaccacagggtccaaggggtggtcgaggatgcagagggtcctagttgcccgagctcctgggtgtgcacccacttccttcagtccactgcagctctttggtcccctgtgattgtgatgaccatctggagagaaggtttctaatctcccctcttatcagacaggacactcagatgagtctgtttttatttaaaattttggcattttgcttatcttggatttttgtgcatcagtttttttgttcaattattacattaaactatttctcttgactactgagattttggtcctcccttaaattttgtgtcagaggcaagtgcctgtagtctcacctctgttccagcccttgtaaacgctatgattccttgtagtttgtcattaaaaatagttatcaaagccaagtaatttggaagttaaatcaagagattccagtgaaacgctggtaagcgatgcctgtttatgctcacttagttgctgggcattagcaggtgtaaaaatctaacaaaaacagctggaaggcagacctcaaagctgctggcagtctctccccttggggacaaaagaagcctttcagctttttcatcttggaaggtaaatcataaacgaccaaatattggattaacttagaaaaagtttttttatttttgagatggtaaatgtaatatccttgctgttgaattcctcttcatggtgactatgtattaaaactgggattttgcatggaaaatatttcaagatttgcatggataatggctaatgtactgtctggcttgttgcattttaactataaaattaagttgttgcgctatttattgttatttctaagggacaccatggagagccatttggccagagggagatgggcggtgaggagcgtggtgactggtctagttggcacagctgagatttttgctgctctagtagtcatctggattggctcaggcctggctgtttgttgcttctttcacgggctcagagtgtctggagatctttttaactagccgagacatgctgttactctgagcaattctccaggcagccatgagtgcaaagggagtctgtgccaggtgcccagcactgctatatatggcagagaagggtggcaggggaggacccaccatgcccttatctgggggctgcagccaggcgtgattgtgggggcagtcacacagcttccgtgtgctctcagaccaaccctgtttttcctctccctcctccaaccttggcattgattttagacagccgatgtgcaggttcaatcttcatgtgaaatggaacaatgacttcaagttcagatacccatcactggcagtgctgtatgtacaatctatcaaggctagttaggatgtctttgtggctcgagaaagcagatttttagatacgggagagtttggttacttgtgtttgtgattctgtgctctctattaattggcatgggattttcggacctgaaatttagtgtagatttcagtttattctgaaagataagtgtgaggttgagatgtggtcttctgtgtgacaggtgctgatttatgttggagtcctattaggatagatgcgtcccacattcagttgtatgtttcttaggtcaatcaaagaaactgatctgaaggtgtaccaccaccttctctcccaagatgacaaagctgtgttgggtcattggttgggagcagtgcagatgagaagacaaatgctgttgacaagttgtgtgtctagttccttaggaaaccagtcacctggtgttgaagacagcagcagaggagtaccgtggcctagcatggagctctgccatgcctttggttctttctgtggacacattttcatggaacctagagattttctggtttggggaaggatacaatggaaaaataattatgagatgatgatgataagatttaattgaatatttgctaagtccagtgcatactattaggccttcaacatatgaatttataatccaatgaattagatattacgttcctttcttacaaaaggacattgaggcttggcgatattaataaatggctgagtggtacttggcacccaagaccgtgtgactccgaagctcctgctttcagtgaaggagcctgtggtaggaacatagggtctgcagtttcagatgttgtggcctgctgtgccttgttggtgattgtagattcttcacgatcaatatggagaaggctgcctgcattgtctcccttcttcttttgaaaaattagtttttacagataattgcaaacaatgcaaaattaaggaatgcaatctctttttgacgttttactccctagtagtgactggtattaaaaagcctccacgcagtacaggatgtgggtagatcaaccctggattggttggttgggatgtgattcattagatcatctatgagattctctgttttttaggtcagagtaattgccattgatcttatgatgcagttctgcttccaggacacttaatgaacacggaaactgaaaagtaaagaacttggcctgtagggtctgtgagacgggaccacccctgggagccgtgttgtgtagaggccatccagccaaggactgcaaacgtggagatctgttgtggcagtggattggattaatctctattaatcagtctattaatctgttgatctctagctgaacaatctcttttgttgaattgttgcattatgatatttatcgtgactactgagattttggtcccccccttacattggtgtcagaggcaagtgcctctgatctcatcccagttcctgtccttgtaaactctgtgattgtttgtagtttgtcattaaaaatagttatcaaaggcaagtaatttggaggtttaattgagtggaggaaacttggaagaaccaagtttcagtagcatgtagctatcacgtgaattttcatcctcccaaggttgtgctggggagattgagacaaaagaagtacaaacaccttgaaaactaaataggcagttcctgtgccaggcaatgggatgggattgtctcattgcttctgagtattgtcgctgaacctgattattatgaatttaccttattgttatattgtacattttaagaaatttttaggtattttatattctaatgcttgcaaaatctggaatcatcctgtgagtttacaaaaaccagtaatggtctttttgaagtactttatcaacttttgttaatttttctgtgttgtatgtgcttcattaacttctgttagactataagagatttctcagtagtgcctactgaatccatacacaatgagggacaataggatcccaggatcatctgctccacagaagcaggtatcacagtggcaccgaccagcatgggaagagtttttgtgctgacagcagggcattctctttgttctgtggtccatttgtagatggctgcgctcctctgcacaggggctgtcgcttctgcatggattggtgtctaaaaaccccacctaaatgagaattagatattccctttcttctttacccagaattttctttttataaataaaaataggctgggcacagtggctcatgcctgtaatcccagcacttttggaggctgaggcaggaggatcgcttaagctcaggagttcaagaccagcctgggcaacatagtgagactgtaccactacaaaaaataaaaaaacttagccagatgtggtggtgcatgcccgtagtccagctactagggaggctgaggtgggaggatcacttgagcccaggaagttgaagctgcagaaggttgtgatcgcaccaccacactccagcctgggcaacagagtgagactcactctctctcaaacaaaaaaaaaaaaaaaaaaaatttggtttacgaaaacacagcagttgacttttccataggcaatttgtaggtttggcattttactgcctttagagatgtagtattgagtatagtctgttagcctgttggtctgttcacccacaaataggccagttccaattagctataatatttgttttagggggaaaaagtcttatgtaaacaaattatttgcatttatacttttgttaaaagttgaactcgagttagttatttgagacaccaacattacctgtctaccatattgttcatatagtgatagttctgtgtaagtagactttagtcaagcttcacattaaaaaaaatttaaccactgtttaccctacttggtataattagtaggctttatcaatttttttatgctgtgaagtctagatctcaaaagatatacgtcaattttttgttgttcagaatgaagattctgtctgaatcagtaggaaaagaggggagggaacgtgatttgttgttcacatgatatagaagaggctggtgagagaggcctttggaagccttaaaacagcttggtgtgaaagttagggtgccctgggagctgacaggtaggaggagtgggagggggagatgggggcgggagtcagaagaacagctcagctctgaacacacctgttacagtcctatcactcactgatgatagaaaaccgcattttgttggaacgggcacagtgattgtcaaggaagttgtcttgtgctactgccatggattcaaaagattcttgggtcgtgaaagaggtggcatcagaaggatatgtttgttgacagggagaccagatgcactgatccattttttatccttttgccttcagagcatccttgtctccttgaattcactgctgtctcagaacccaggagggctgtcggagccctctcctgcagctcagctcccagggggctctcccagcaggctggggctgtctcccagccggccagctctgctggaactggaggaggcagccagctgcaatgggactgcctctttttcgtcttgaagtggtttcaggtttcctccctttctcctcttggggtggggacgggaggctctcaccagctgtcgcctttgtgtttttctctctctccagctcaagtcagctgacacctttcctttcttcccttcccttctccatgaacttgcacggagtcgctggcgggtcagtgtgtaggagggtgaaccgtagcagctgtccttgccttccaactctggttctgccctcctcctgacttatcctttctccctttctttgacagagatagggaatattttccagcaagcttcagaaaacattctatgtggtatgtgcagagagatcctctatgcatagaatcttgcacaggatttaagaggtcagtgcatggggcattttctatcccctgctcccactttattgaatatcatactgaactcagtagtttaggatgcattcctaagtttagggaaagctgtgaggatcttttgattcattctagaacattccaaagcaccactgaggttgcacaaggtggttcatagcaataggaccgtgatgcttatagggcaagaggaggggatatcacaggacctctgggacagagggaagcactgaggccttctgcaactctgcaacaaagttcctgtgatcccctgccctcgcctctctcccagcactcctgggatttcagcattttaattaatataagtcaggtggacgcttatcttgctggattcctcagtagtacttgatatggttgatcccttcctcatttcttgaacagccctctggtgcggtcattctttaacataaactttttattttaaaataactttagatttattaaaaactgcaaagatagtagagagagtgtacccctcacctcatcctctttgctaatgtcttacatcactgtgatgcatttgtcaaaatgaaccaacgttgactttaactaaacttcagaatttatttgctgttcaccagtttttcagttagtgtcctctttctatgccaggatccagtccagagggctacattgcatttagttgtcaacttcattttatgtaataaaaactttacctacatttcagtggttggtaattttgtttaaggaggtgatcccttaaacaaaacggagaaagtgagttactttctgctagctgaagtgttactttacatccatttgtaaatttttgttcagatatatcaatcattaccatttactgaacacccccatttgtgcttgttctggttttatgttttatgctacaatgtgctctaaacattttagaaataaaattagcagtactttgtgtgaagtggcaataggcttcctccccttgaccccttctgtccccttattttgagacagggtcttactctgtcacccatcctccccctgacctcttctgccctgtttttttaagacagggtctcactctgtcacctaggctggagtgcagtgcggtggcgtgaacacagctcactcactgcagcctggacctcctgggcttaggtgatcctctcagttcagcctctctggtagctggaaccgccgatgagtgccaccatgcctggttaatttttaaattatgtgtagagatggggtctccgtatgttggcttttcttccattttaatgaggtattttaatgaggtagtgatgtgctgtggagcttattaaaaatgggattctgaggccatgtgaggtggctcacacctataaccccagcactttggggggaccccaagacgagaagatcccttgaggccaggagttccagaccagcctgggcaatatagtgagactccatctctaaaataaaatacaaacgaaaatgggattcttcctgtctgagtagatggatctagtaccagctttcccaggactagtggtgcttataaaatcctgatcattccctccagctatcttattagaagtgttttccttaaagtcatacatgcatgtatcatgtaggatggttagtctagcatatgtgtgtttgtctttggtggtggggcaagagtgggagaagaggaggttgtatttcttcgtaggttaaaattggctttaaagacagagaaagaatagagtagaaaatattcgagggtattgcctgtagtaagacccatatcctgtatgaggcagtccagagtctcagctttttcagcaagacgcccccatctgctgttgccttcttcctcctgggcctttgcctaatgggccctttgctgtgggcattctcaatggcagttctgagaaccacctgcgggcccaggcgtccctagcgtggtgtgctgtgttcttgtgttcctactttcctagatgtttcatgctggtttgctgtgtgtcttagttcattcgtgttgctataagaaaatacctgaagttgggtgatttataaaacaacagatttatttctcacggctctgaaggctgggaagtccaaactaggtgccagtgtctggtgtgggcctggattctgctgctaggttggtgcctagcagctgagcactcacgtggtgggggagccgagggcccttttctaaggctaatctccttctaaaggcacctcctctctactgttgcgttggggattaagtttcagcatgaattgtggaggggacacaaatgttcaaaccagagcactgtggttttgcctcccccaaatagaatgctcattgtgggaggggataggattttcacctctgtggtaaaatcggctccatagtgttgggcagacgtctttcttagtccttgttggggtggaggtaaccgcaccacttcagctgtcctttaaggcaaaatgtagccaagcacctgagtggagcttttggcttctgactgttgttagtggagaagtgggaaatcttccttgcctgagcacatagttacagaataacccttggctcctgttgaaaagtgaaaggcacattgtatgcatgagatacctttgacctcaccgactatttgctcaaccacctaaataaacaccccgtattcttgggaccaggtcaatactgcagacccctgcttctctccgtccccctttctccccttcacccgctttctcatttctgtttctgtaactgtgtcttgctgttctcagttgggattgtggagcatctcaaccgtaaaaggggagggagacatgagtttgttgcttctgaccttttgggatgtctaaagtcacctattttggccaggcatggtggctcatgcctgtaatcccagcactttgggaggcagaggtgggcagatcacttgaggtcaggagttcaagaccaacctggccaacatggcgaaaccctgtttctactaaaaatacaaaaattagctgggcatggtggcgcatgcctgtaatcccagctacttgggaggctgaggctgaggagaattgcttgaacctgggaggtggaggttgcagtgagcctagattgcaccacttcactccagccagggcaatagagcaagactctgtctcagtaaataaataaataaataaataaataaataaataaattaattaattaataaagtaacctatttccaacattttgaaataactctttcttcagtgtagttgtcactttctttatgaacacagacagtggtgcggattcaagtgatctatttttgtttcatttcttttatagctttgtctgctgatgaaaaaaaaatttagctaggtgtggtggcatgtgtctgtgttcccagctattcaggaggctgttgtgggaggatcactggagcacaggagtttgaggctgcagtgagctgtgatcatgccactgcactccagcctgggtgacagagcaagaccctatcaccaaaaaaaaaaaaaaagggccaggcgcagtggctcacgcctataatcccagcactttgggaggccgaggcaggcggatcatgaggtcaggagattgagaccatcctggctaacacggtgaaaccctgtctctactaaaaatacaaaaaattagcgggtgtggtggtgggcacctgtagtcccagctactcgggaggctgaggcatgagaatggcgtgaacccgggaggtggagcttgcagctagccgagatcgcgccactgcactccagcctgggcggcagagcgagactcttgtctcaaaagaaagaaaaaaaaaagtaacaagtttggtgtggtggctcatgcctgtaatctgaacaatttgggagggcagaaggattgatgacttgagcccaggagtttgagaccagcctgggcaacagagtgagactctatttttattactccaagaaaagtgtcattacacaagtggagtgtataccatatatataaaaaatatttctgttaaaaatgggattatactacagtacatatattgcattgctgaaatgattacaggcaaagtgtactgatatccgccacttactttaaaaggaataaaaaataaggggggttgtttcaaattttttttccttttatactgcaaagggcctgatgagaatcttttcagataaatcattgcatatatctactttattttcttacgggaaagtttggaagcccatgtgggtaggttagcccattttgatattcattgctgatgaagcccaggagatggaatgcttaatataagccagattttgggactggcagcagatctgttgtgttggaacagatcattcaaggagcagggacagaactttgaatgtggttagttgtattggggttcaatgtcagattgagtcagaatttcaatttgcagctagtgagaagtcctgtaatcgttattgcatattccataatatcttgtcatatgaacctatcataactttattcctttaatgaaaagaatattttctcaaattttctgctgtaaataactagtgctatagcatctctacagctttattcttgtgtatggaagctacgagtagcttagagcaaaagaaacatacaacttatgtcttattattgacaaattgccctaaaaaagataattgatctctctcgtgaatactaggttatctacttattattttctgttgtccgtttggatatactcaaaaagtgctacatcatcattgccttaatttcccttagcaccagggaattttactgttttctcacatgtttacatccttttctcagaatttcctattaatttatccattttgctcttggggttttttttttttttttcccataagccctttgtaatagtaactttaaatgcagtacacattgaaaatatattttctgtattttgtctgctgtttaactttttaaaatggcatataccatactttgtacagaaatgttaaacttcctggcttttgggtattaacatctagtgtcttgcttaagaaggcctcaccttaaattgcaaacatattctctttttatatctaatagtttaaaattaatgaaagaaagcattttgaatctaatcttgaattcatatgggattgattttgtatttggtaaggtagggacctaatttcttccccacactcctccaataggaaagccagttgtttcaacacagcatgtgaagttttttgttttctcttttattttaaaaatgccccatatgggccgaggtgggcggatcacaaggtcaggagatcgagaccatactggctaacacagtgaaaccccgtctctactaaaaatacaaaaaaatattagccgggcatggtggcgggcgcctgtaatcccagctactatggaggctgaagcaggagaatggcgtgaacccaggaggcggagcttgcagtgagctgagatcgcgccactgcactccagcctgggcgacagagcgagactctgtctcaaaaaaaaaaaaaaaaaaaaaaaaaaaaaaagggccccatatatttgttatatgtgtaatcttcaatgatgggaatttggcagattttccaagtgcagaagtgtatcactcacatgcctttttgtagtgctttgttgatataatgaatttactttttagtagttgagtaactgataaggcattatagtaaaagttttttaaaggatttttttgaacctgagaaataagttttaacattctaaataataaattaggagattaggaaacattaaaaccatatggttactttttacacttttttttctgaataagtgattgttatgtttggggttaattttgtcaatgggaaataagtataaaacagctttgttctttctatgactgcttatggtaaaaaaaaaaaaacagctttgattttactttcgcagaagcataatttactctcttcttttgtgaattggtgttagctttatattaggagttttgagaaagatggtttatattaattttgagtctgctttccagaacaaatacctgataaaaactctaaccatggcagggtgcggtggctcacgcccataatcccagcactttgggaggccaacaccagcggatcacctgaggtcaggagttcgagaccagcctggccaacatggggaaaccccacagatctcaaaccccgtctctactaaaaatataaaaattagctgggtttggtggcacacgcctgtaatctcagctgcttgggaggctgaggcaggagaattgcttgagcccgggaggaggagttcgtggtgagccgagatggtgccactgcactccagcctgggtgacagagtgagactcaatctcaaaagaaacaaaacaaaactctaatcatgtttgtcactagttgtttttttaagctgaataatttttctttttaatcacaacgtagaattatgtttgtattggaatcttggacagctgttagtgaataaaatttttatttaaattttgtcttaaagcatttttggaagagtgattgtaagggactttcaacacattctaatagtcactgtcaatgatactgggaaaattctacttccatttgtaatcaggaaatgactagttaatcttcacttggttagtcatgcttttgtggatggtgattaacggtgttaactttgaactttggtataaagtgtaagtagaggcaggcaaatatttcattgtagtagtgagacttttatgttttccattgatagaggtgagcttcttgtttccttgtcccagacccctttattttgatatcaccttgtttcctgtagagggcagaagagagagggagttcaaagagagggtgggaggtggggaagagacactagactggagtcttcatagaggagctcctccgtgggtccctcgtctgcctggtgcccgatggctgtccctcatgttgctatttgtagtggccttccagtatgttcctcacactgggtgtgagtattgctgagggaggtatgggtttgtgaggggtggttttccatttatttgaaggctcaactttcgtattgcaaaggcaaatattatggcgtaacgtaaattctatatgaattttaactcatttacctatttatcaccgattaatcaattactaattatttattattgattgattgattgtcttgctctgtcctccaggctggagtgcagtggtatgatcatagctcactgtagccccaaactcctgggttcaagcaaccctcccgcctcagcctcccaaacagctggaactacaggcacatgccactatgcccggctaattaaaagaaaattttttcgtagaaatggagccttgctgtgttgcccaggctgatctcaaactcctggtctcaagctgtcctcccaccttggcctcccaaagtgccattataagtgtcagtcattgcacctggcctgtatgtattttaaaaataaaatcaagatatctcacaaaatacttcaaagacaatttgtatgggtgggggtggacaaagggattagtgcagtttacttcaggcctcctaccctagagtgtctccattttactacttttgcatgtacttgagaagacctgcattgtgaggcttagctgtacttttgttaatgtgactgttttgtagtttaatgttttcagaagattgcgtttctttttttttcttacctttcaataagcgttctcaggttgaaagagtgcatatctcaatgatggtatgtaatgttttcatcgaatagccctttggcagccggccttttaaagttagagacagggaaaacaccctgctgtcatatatttttcaagaaaagattaatagctgtgattcattctgcaaatagctattctttttgagagttagtcttgcaaaatttcttcccttccttttattgttgtcctatcaattctgagaaactgagaaaaatgagccttgggattatttctcattatacttgtctcactgaatttagtgggcttatttcttcactcctctcttgtaaatatttgcagactcattacagcatttgcctttcctgtgatttaaattaaaaataaagattttggtaagctgtatgtggcatgatgaaaaaactaggagactgtggaagaaggaattaggagatgggaatgttggatattgctattcaactactatttgattgtgaaaaaaattacttcttgatttttgaacttcaacttttctcaattgttggtgacctctagagtctttgcaatccctttaagttctgtgattttaatggcaaataagtacttttattttacgacctcaaaagtgtggtcattttatgagaaactttataggacatgtagctataggtttttgtgttgctttcagacaaacttggaatgatagttcaggtaatgtgctaatcactacaaatttgtctagtcagcgctagagcagcaagtgtaacttttatagctgtccatgtcagtggattgtgtaaagactaataagacttgaaaagactaagaggtagtgaacagctctccaaatgagttgattgaagtctgtaggcaactgagggtctcatatcagaatacattttctttgcatacattttatgccatgcaagttgaaactcaggcctgctctgtagaagaattcctaaaagaagatgtcttaattttatattttgactttttttctgatttggaagatcattataaaggtgagagaaaacagcgtaaaaaaattgctcatagcgtattcaacagatgattataatgatgacttaatcaagtatgcacaaatatctttatcatatggaaaccctgcccgtagaagtttgtagctgtgaaattcttaagtttggggcacaatgttgtgtacttacactaatagagctatataaccgggtcaaattgtgggttggtttaagaatttcacaagagaaatgaatagttgtggttctttccttgtgtgtatgcgctcattaaggctgctggaatcctcacagcgtctactcgctttgcaggacctaatggagtacgtttttcaaatttaaatttttattaatttcaattttattttattttggagacagagtcaccttggctgagtgcagtgttgcagtcatagctcactgcagccttgtactcctgtgcccaagtgagcctcccacctcagcctatccagtacaggtaggactacaggcatgcatcatcacacatggctaatttttaaatttttttgtagagacgatggcttgccgtattggccaggctggtgtacaactcctgggctcaagccatcctccttcctgggcctcccaaagtgtagggattacaggcgtgagctcctagccatggagtatattttgaagactgcctttggcttcatcttgtttttttaaaaattgatttcccctgatttctatattattgttaaaaagtagtcctgcattatgtaaatttatagctgtacagtgcagtttaaagttggtgaaaacttttcaatctgcaaactcattaatttccaggtctggttaatttatcctttaggaaaaaaaaaattggattttggagagagagaggtgagatttgtagatgcgttgcttttgtataccatccacttctctttatatattgttggatttaatttggtgatatattgttgctgatttttgtaccttagttcatgagggagaagatgtatacatatttgtctgattttggtatcaggtttattttggcctttataaaatattttaggtgaggatatagccctgagacattattttattttattgagcattttaagaaacacactaaaattcttaatgaattgctctttaggtctggttcaggctataaaacctattaaaattctccaaagcacattgttgaaagcccctgatttctaggggagggaggtgatgttggatgtgtttttatcggaaggaaggatctttccttctctttccaatccgtttaaatttaatctctccctggggatgcatcacagatgcgtacacaacagccaggagtgaagtacaaggaactccttggaccatggtcagattacttttccggctcctccaggagactgctcgctgcataatgaagttaatttgtgtgtgtaatttccttagtggatttttaattaagtggaaacttttggggcacttgtcaggttcatttactgtaggagacccttctatattaaatcaagttctactatttatagatgtttagcttccattttacatgtagaatccttcaaattctcacaacaatccttttttatagcatcatatcttatcttatctttttttttttttttgagatggagtcttgccctgttgcccaggctggagtgcagtggtgtgatgttggctcactgcaacctccgcctgctgggttcaagtggttctcttgccttagcctcccgagtagctgggattacaggcacccaccaccacgcctggctaatttttgtatttttagtagagacggggtttcactgtgttggccaggctggttttgaactcctgacctcaagtgatccgcccacctcaacctcccaaagtgctaggattataggcatgagcctccacgcctggccaatagcatcatatctttaaaagcgtaggctgcattcagcattttaaggatttatattcatagtcacgcgccgcttaaggaggattcattctgtgaaatgagttgttaggcagtttcattgtgcgagcatcatagggtgaacttacacaaacctaggttgcagagcctactgcacacctcggctgtgtggtctaacctgttgctcctggactgcaaacctgtacagcctgttactgtcctgaatactgcaggcagttagaacagagtggtacatagttgtgtttctaaacatatcggaacctagaaaaggtacagtagaaatacggtattacaatcttatgggaccactgtctgtgtgcggtctgttgttgactgaaatgttatgcagtacatggctgcatgagattaacttgataattttgcctgatatgaaacctagaatattacattaaatatgagaaaccatttaaaaaactaatgtacctcctgaaaatttggactttttgactgctacatctaggtaatgagaaacaaaaggcaagtacagaaatggttgtattctgctgggcaataaaagccttttactgctgcttgggatgacttcatccaaattgggagcacttagaaatagacaacaatgtgacatatttactggaaactgattagcagcattaggacaaacacaagtgtgtcagtttaaagtggagagtactttgaggtgcatattttccatttttattattcatctgttagggcacatttcagggttgaagagaggtttggtgttttttttcctgaagtgcccctgcgtcattgcagttctgtgaaagtattcaagatgtgggactagctggctgctaatgtgactatttttctaaattacaaaaacgttcagaaatgacatttagcgtcagaatcctttagatactttatttgctatttaatgtacaggcttcctgaagaatatttgtatgtatttgaagcagtatataattttgtcaaatattcaagagcctaaatttgagtgttttctaaaaacagtattttattacatatggtaaatttggtaaattcttaactagatagaaaatagagaataaagggcttttactctgtgtttttcttgcctacagattcatcatacatactgtgaagcctcgaaatgcctagagtctaataaattagacttaatatacctacttgttgatccagaatgcattgcaaggatcttgtattgtctccgggttgacatgttgaatgttgcttgtcagatatcgggtgctgaaaaggcctgtgcccagtatgtggtaatggttgagtctggaggggttggatggaagtggtgtgtgtgtgtgtgtgtgtgtgtgtgtggcggagggagggggttgcatacttgtgtttcacctgcgtgcgtgcgtgtgtgtgtgtgtgtgtggtggagggagggggttgcatacttgtgtttcacctgcagtagggaaaccttttcattctccagcaggccggggtttcgtaacagggctggaggaatgttattctggcaacagtgtgtgtgattgggaatggagagatgagagaccgggagcagaaagaaaaccttaaaggcttcaaagtgcctataaatcattatgtatataaacttggactgttttttttgttgttgtcgttcaaaaaaaaaataaacatagcaatctctcattgctgtgctcagacttgcttcagttaaataaattttgactacagagtacaaggtggtagttctttgtgcttgcaggtgtcagcagtctggaaggactgatgtactttgggtcctatgaggcttgccctgcctgcagggagaaggctagaacacattgttttaatgatgtctgtcatggccagcctgagaaattgagaagatgctgcataaaacgtgggaacgtgcagtgcttcctgagacctggggagcctgggccagagcaagcttgtatgccgccagtggcagctgttccttagatagggttcatgctctcaggcttgcaggcacccactcatcctgtccctcatttacctgcctggctcccataggcttatgagcttgtgactcttgagccaaagtctttaaacatattggaaggatggaatcccccaccacacagggtgcagagggaatggatgctttgtgggctctaaggatagtgtaatggtaagagcagtggtgcctgtagatcttgtacttcccctttattttacaggttggggaataggcagagcttttatttgtctgagcttacccagctggttattggcaaagcaaagactggacttgattccctgtccacagaaaagggtagaaagttgctgacaatagagggctctgtggtcagaggagaagttcagaggtctgtgctcagaaaggagaaagtataaagatgtaatgctggcctttccttatacatatgagacagaaaagacccccgctcccgcctccccccacttttttttttggagatggagttcactcttgccgcccagactggagtgcagtggtgcattctcagttcactgtagcctccacctcctaggttcaagtgattctcctcagcctcagcctcctgagtagctgggactacaggtgcctgtcaccacgcccagctaattgtgtatgtgtttgtgtgtgtgtgttttgagacagggtctcactctgtcgcccaggctggagttcagtggcacaatcttggctcactgcaacctctgcctcctgggctcgagcgattctgcctcagcctcccgagtagctgggattatgggtgtgtgccaccacgcctggctaatttttgtatttttagtagagatggggtttcaccatgttggccaggctggtctcaaattcctgacctcaggtgatccaccctccttggccttccaaagtgttgggattacaggcgtgagccactgtgcccggctaattttttgtgtttttaatagagacacagtttcatcatgttgaccacgctggtcttgaactccttaacttaggtgattcacccacctcccaaagtgctggggttacaggcatgagccatcgtgcctggccaaagcttttgttttagtaaaacatgaactcgatttgttctaagtataaaagtagttatagccaagagctttaggaagttatatggcatctgttgatggttaaaagacatgttaggcagaaatccttgtggtgctaattgattacctttacactcccttaagtctggaaagaactttaaccaaatggcattctaaagacatgtatgcttagatactgcagttatctgttacatgactgagaacgtgggattaaaaaaacaacaacacacaaacgcattcactcaagacagtagaactagtccacagcaagcaaataatgttttaggtgtagtaaagtatctgcctttttgcaaagtaacttttgttgttcagttgcagtcctggtgttagctacccaagctggctggacattgtgtcatctgagtttctttctaattcacttgttcttggttggagtgttgtgtagttagtaaagctcgcaggtgtttctgatacagccaggattgagaaccaccatgtattccctcattcccttttgagatagattgacactagatattgtgcccccccaagggtagatttttacgatgaataacactactcctcacagttgaggaagtagggactgttgtgaaaatcctggcttatcagaatggcaacgaatacttagcagtgactgaatgccttgagctattcggagagcttgaaaagttttgactgggctgggcgtggtggctcacacctggaatcttagcactttgggaggccgagacaggtggatcacctagaggccaggagttcaagaccaccttggtccaacatggtgaaaccccatctctactaaaaatacaaaaattagccaggcgtagtggcaggcatctgtaaccccagctactcaggaggctgaggcaggagaatcgcttgaacctgggagttggagcatgcagtgagctgagatcacgccactgcactccagcctgggcgacagagtgagactccgtctctctctctctctctctctgtcacacacacacacacacacacacacacacacacacacacacacacaaagttttgactcattcaatccttttaacaattctatgagtaagggactcttgttactcacatttctcagatgagggaaacgggcagagagaggttaagtcatttgctccagctatgtccagtcttcactgttaattcctaggctccattgcttgtactgaatgagctgatgcttccttcatatttgtaactaatcagctcactgagcggattttagaagctctagcatttctactgctccagcatttgctccgcagttacgttgttgtcacttgggctacagcatccagtagactgatgttcagggctctcctgcagactgctgctgcccgtggtagcacagcccagctgacttgacctatccccagagctcttcttcacctctacacccctgcctttgtcctgagttaataatataacataacagtaaaaacaaaaatattttgtggtcagttttctagttactgggtttaatgacaactagccagtttagcttatatatattcactatagtatttcctttagttctatgtgctatgtttactgtgatcatagtaaaattattttaaatacttgattgggattagaacagggcagcctcttatatataacttaatttttttactagcaagtttagaaatttaccagcaagtttataattttttctagccaatgtatgagcttataaacaaaacaaaaaactctttagttatgtaagagaactgaagggaaattacagtgctatcttcaccactgcaagagggtaggtgcttgtataagcttttaaaaatgggcatgacttgcaaggctattttagttgcatggagaaagccatagatcacaatgcagtttccaaccatactgcattgacttaaaaaaaaataccctgagagataaataattaaacaatatgggatgcatttcatagaatcttcaggattacatgcttattttctcacgaacactgagtttatttgaattttggattatgtatatactgtccctgtgctccatacgaagtttccattaagaatgtgttcttgctttaatgatgtgcactcctgtttccctctgcagtgaacaggaattaccaagcttgtgctcgttgagtgctctctgctggtggctttgggttttaatatcagtaacagatccaccagtgaagtgtagacgagaactcaaactggaaagtgaaaggagcccagctcccagcctgcggcacccttccactgtgagcccagagtgcgattacagatgtcccctaaagaagtgcccccatccctggtcctgcatccctgcggtgtgctcaagcctgcagttcctccgctgcatcgccgtgatcaatacttgagcatattttaaaacacagtgtactagaatgatgccagatttatgaagtgattgagctttttccctaggcggggaacaagctgtggaaaatgggaagtttaaaagtcttctgacatcataaagctgagattaattactatgatctgattgatatctaatacattttggtttttcaaacagagtttgaaataattggtgatatgagctcaaagaagtttatgatcttatcagaggtgaccttaaaatttggggagtcagaaacagaagtcaaaggcactatgcttctttaaggaaaaaagcaatcagaaatgcataataaacatagtgactttgcttctgtgtgtctctctggctgtttcagccatcattggtggcctttttctcgtatgattttactggatacatgtaaatcaaaggcatcctctaacctttcaagtcaatatatgatttcttttttgtcccccagacagagcctcgctctgttgcccaggcctcctaggttctcctgccgcagcctcccaagtagctgggattacaggcatgtgccaccatgcttggctaatttttatatttttagtagagacagggttcttgccgtgttggccaggctggtcttgaactcctgagctcaggtgatctcccacctcagcctcccaaagtgctggaattataggtgtaagccaccgtgcctggccaatatatatatttttgtaaaaatatgctttcattagggaaaatttcaaatatactacaattgttaagagaataacatacctccatgtacctgtcacccaacttcagcaattcacatttttggccaatcttgtttcttctgtaccctcgcactatttccattccatcattttgaaataaatcttagatatcagatagttacactggtaaatatttcatcatgttcaatatatgtatttgtcaaaaaggaatattaaactaatatcctgccttctgcctcactttctaaagaagatactgtgttttgaaaggtggcttacaaaatgctttgtgatattctaaatgctgaggcaaaatatatgaagttaaatgtttttgagatgaaggctgtcaacagctttcggagcataggcaagaagattgtggggcaagtgtgcgcaggaagtgtgaggcccaaagtgtcctgccctggagagtgagacggaacatccccagggagtaccgtgctgaacatcaagcctgatcttaccctgctgtcacaggagattaagtggccaggctggttcttcagtcctcatttctcaaaacacatacatggatgttttctatgattatagtttatagtgaccttgtgcagaagcattgagccagtttattattaaaacttggactaggtaaactataatttgatttctgtacaggcgataaccactggagatagcaagagtgaatgacagtgtggtgacgggcaaatcttatttgttactgtttagacaatctatatatacatagataaacagtctatatatatacataaaacaacagtatatatataaaaatatataaatatatgtctcaaaaatatatattttgagacaggatctcactttatcacaaggctggagtgcagtggcaccatcatgtctcactgcagccttgaactccctgggctcaggtggtcctcctaccttagcctctggagtagctgggactacaggcacgtggcgccatgcctggctaatttttgtgttttttattattatatttttttagagatgggatctcaccatgttgcccaggctggtcttgaactcctggactcaagcgatctgcctggtttggcctcccaaagctctaggattacaggcgtgagccactgcacccagcctgtttagacaatattaaagccattgtttttctagtgttagagtttgtatgttataatttagtacatgcttaattgaaggtattggtgtaaccccaaaatatatatttttcacataactcagattagcagtggtatttagtgctttagttatatcttccagcagataactgaatggatctcactttatttttatcataattggtgagagctgggaatcttatgtctccaggagatggctgtacaggaactgtgtgtgattcgcaatgtggaagagcagggtcttgctcccttgggaaccctgcaagtagttgagccccctggtcactcagcttatcactgtggatgctgggcactcctgggggatgctctggagcccctctcagggtattgccttttcgctggctatggggttggaggagagggtcagactccttccctgccctcagcttgccggctgcccaggcacaccctgtgtgcagcttcagcattcctgtggcattggtctctgtggtttttcttcttttcacatagcttactttacgccctgttcgctccacaactcttttcaaagacaggatggaggtacaggaaggaaataacttaatttgaatattaaaattctgttaattttagaatgcagtctcttcagttctggaattgatttcttttggttgctgttggtctttgtaaggagcgtaacattgcttaagatttatatataaccgagtcattttctgtctctgtatcatattcctttaggtaagctttttcaaagttactttgaatagttgatatagatttagaacaaacgagtcaccattctcaggatacttctattgcctttctggaataatgcagctcattgttctgccaagtatcctctaatcagcctgaaaagtgttttcttttatttcatcatgacattgggccttttaattgagagtgaaaatcattaaaggcaaattattttgtgtaaattatggtagatttagccttactacataattttggaatgtttttatgattggttgtgtatgctctggcagatgtctttatcatgacttattttaggtgggttaagaattctttttttttttggagacagagtttcgctcttgttgcccaggctggagtgcaatggcgcgatcttggctcactgcaacctccgcctccctagttcaagtgattctcctgcctcagcctcccaagtagctgggattacaggcatgtgctaccacgcccggctaattttgtatttttagtagagacaagatttctccttgttggtcaggctggtcttgaactcctgacctcaggtgatccgcccgcttcagcctcccaaagtgctgagattataggcctgagccaatgcacctggctagaattcttggcatagtacacagtggcattatttccaaggcttttttttttttttttttttttttttgacagagccttgctctgttgcccaggctatagtgcagtggtatgatctcagctcactgcaacctctacctcctggtttcaagcaattcttctgcctcagagaatcaaacagttgtcctcccaagtagctgagattacaggcacccaccaccacacctggctaattttttgtatttttaatagagacagggtttcgccatgttggccaggctagtcttgaacgcctgacactcaggcgatccacctgcctgggcctcccaaactagtgggattacaggcatgagccgccgtgcccgtttgcaaatttttaaaagtaaaaaagcaaaacaaacccacatgtcagtgtttcagtatttacttcagggggaaattgtatcctaacataccctgcaccataagctgaaatttcagtgccaattccattgcttgtgtgtccatccaaaataaagacaagtttttgcaggaatgtcagatgactgtgggacaggcctagacaggaacaaaactggaggcttcgcatcaaaacaaacacccacctaaccacatgggttttgccctgtgagttgtttgtcatcctagattttcagcaagaatgggctttagtaccatatttcacatatgaggaggtgctaattttgttaatcatatcacattggtaatattcatcactacattgtaatatgaaagttgaaagtcttgaacttaaagttcataaattcattgcccaaatctctggttggctttaaatgtccttttggaggggagaaggaaagaggggcatggtttgagggttatactgaaataatctgcttgctgtatgatatcgagcaggtctaactaaaaaggtaggtggtggtttctcttgcatgcatacaaacatgtttctggccccagttgtcaaacgagttttgtgttttccttgtctagtcttgttgacctgctatttattttagtcttttgataaacaggaagtgttgctgcactgcactcaggaatgtattaagtaactattaatattaaacaagattggagggatgagaagggatttaacttaaagtagagggaggatataagaaaatgaaataatccttaaaattttagaattaaaatttatttggggccttttgaaatgctttttttcccttgaaacctcaaattctggatttacatttgatgtttctgttggtggtatattacattgctttaaggttgtttagaacaaacgtcacaattaatgatgacatgaaggttaggattcgagcactagcttttttcagacaggtctaaaaagggctctgccctagtctatccctagcagagatgttacatgtgcctggctcaattcaacgtatcagtatattgtggggagaaaggatgaataaggacaacaccacaagttgtgatggagtgtattgtttctaggctgtttccctggttgttccaatacaccatgcatttttttaaaatttattttttatttttatttttttttgagtctcgctcttgtcccccaggcttgagtgcagtggctcaatctcggctcactgcaacctgctccttccgggttcaaacaattctcctgcctctgcctcccaagtagctgggattaaggcacctgccaccacgcccggctaatttttgtattttttagtagagacagggtttcaccatgttggtcaggctggtctcgaactcctgacctcaggtgatccgcctacctcggcctcccgaagtgctgggattacaggcgtgagccaccgtgcccggccaatttatttttatttttgagatagagtagagtcttgtcgtgttgcccaggctggagtacagtggtgtgatcacagctcactgcatccttggtctcctaggctcaagcaatcctccagcctcagcctctcagtagctgcgactacaggcatgcaccaccatgcctggctgattatgttgccttttgtggagacgtggtctcactttgttgcccaagctggtcttgaactcctgggttcaagcaatcctctggcctcggcctcccacagtgctgggattacaggtgtgagccactgtgcccagcctcactgtgcatgttttgacctcctcacctttgtcctaagatttctcctgattgaaaataaatgaccatttcttcatgaagcgttctttgtctttagtgttttctgtattttctcaattcatgtactgcttggttggcagttacaatttccataactgagtattgttagtgaccttttcatatacctatggcttgcctcccaaaattgattttttttttttttttttttgagatggagtctctgttacccaggctggagtgcagtggcaccatcttggctcactgcagcctcctcctcccaggctcaagcaattcacctgcctcagcctcccaagtagctgggattacaggcatgcaccaccatgcccaactaattttttgtattttagtagagacagggctttaccatgttgcccagggtggtctcgaactcctgagctcagacagtccacccatctcggcctcccagagtgctgggattacaggcgtgagccaccacgcttggccccgaaattaatatttaagtgttgtagaacaggggttttattatagatttggctgtaccgctgttattgcataacacaattattttcagactgggtgtttggttcttaattcactggtggtgtgcaccatgccatcctgccatccccagctgctgtcagagtacatggtaaatatagaaatgtgtccagtcagtagtagccacgtggacgctcttctccatatttgacttttcttgctcttagaaggcttttccagtaatctgcgtgggaccgtgactttgcttgcttatggtgtttccagcacctccaccagactctcagggtttggaaagctgttctgggtgaatggtgtctacagaactttgaactctgcgattgcaggggaacatgcttataaatgcgtgtttaatacagaatgttgtagaggagattaggtacttttaattttgtattatgggttgttttcaagatctaattatgtgttggtaggaatggctgttttatttctacttgtgggaaaaaggctgcctggagtttgtttaatttttctgatatagcatcatagactggtagagcaatataggaaccccagagaccatccaactccctcatttctatacaaaaggacttgggtgcccacaaagaggaaatgacttgtgcagtttcaggccacttaaccacagagtcattttattgtcctttttgtggctactgatagataaggcttgcactcactagatgcccttgtcatcaaggcccaggtcaccagctgcacacaatttatctgtatgtctttaaagcaggggggtccaatcttttggtatccccgggccacactggaagaagtggtgttatcttggaccacacataaaatacactaacaatatctgatgaggtaaaacaaaaattgcaaaaaaaaatctgatattattttgagaaagtttatgaatatgtgttgggccacattcaaagccatcctgaggctgggtgcagtggctcacacctgtaatcccagcactttgggaggccgaggcaggtgcatcacctgaggttggcagtgcgagaccaacctgaccaacatggagaaaccctgtccctactaaaaatacaaaattagccgggggtggtggcgcatgcctgtaatcccagctactcgggaggctgaggcaggagaatcgcttgaacccaggaggcagaggttgcagtgagccaagattgcaccattgcactctagcctaggcaacaagagcaaaactctgtctcaaaaaaaaaaaaaaaaaaaaaaaagaaaagccatcctgggccacacgtagcccatggggctgcaggttggacaagcttgctttcaagcttcacaacctactctgctcttttgtcccctcctcccatctgataagtttatagttacaagttttattgttgtttgaggtagtccatttcacactttaattactagttgtgtaattatgttttgcctgagttcccatacagctaatttgtttccatgcttccatgcaggattttatcagaaactttaaagtatcctagggaatattaccagtgcagactagttgtatttgtgcttgatgtattctctgttttaatgcattgtgttaaacttcctttttctgagacaccatgtaccataatttcttaaataaactgaaggcacacgcattacatttcaaatgtctcataagggaatataggaacagagaactaaccatgtatgtaaggaattatgaattttatggaattaatgtataaaatctcttttatgtgtattttataaggtgtcttggagcccgtactttaaaattctcctattttaaatggatgtctgtatttgaaactgaccagatggcctagataaagtcttgagtcataatattagggcctttcagaaaaatctaagtgccagtagattttcaaacaaaataggttagcaagggaatagaaattgatctttggcttgaaataaccagtaacagacttcagtgaatgttttgtggtgtgagggctatgtttaagagggagctctagttgattcgtatgctagaccacagattctaggagggtgggacccattcattgcgatgaccctgcatcttgttccgtgcctgccacatggtagatgcttcgtgaatatttgtggaatgaatgcatactgtggcctatgggactcaccatggtgataaacggtaaaacatgcacatcttcaagacgtcattttaagtgctttggggggactgggcataagataaaagtaggattgaagatggttgtcttgcagagatacatttcagccaggaactgaaatgtgggtaagatttccgcaagggaaggggtagggatggctttccaggaggtatagacaagcagataacaagtttgagcaacaggaagatcctgtggacttcatggcttgtatcttgtcatatatgaaggtacatcccctgtgtgtatggctcagtccatgctcatattctttcctcaaagttgatgcacagggccgggtgcagtcctcagcactttgggaatccgaggcaggaggatcacttgagtccaggagttggagaccagcctgggcaacacagcgagaccttgtctctacaaaaaatttaaaaatgtgctgggcgtggtggtgtgtacctgtaatctcagctacttggaaggctgaggcaggtgggttgcttgaggccaggagttcaaggctgcagtgagctatgatagcaccactgtgctccagcctgggtgacagagcgagaccttgtctcttaaaaaaaaaaaaaaaaaggttaggctaggtgtggtggcttacgcctgtaatcccagcactttgggaggctgaggtgggtgtatcatgaggtcaagagatggaaagcatcctggccaacatggtgagacgccgtctctacaaaaaatacaaaattagctggctgtggtggtgcgtgcctatagtcccagctattcgggaggctgaggcaggagaatcacttgaactcgggaggcggaggttgcagtgaaccaagaatgcaccactgccctccagcctgggtgacagagtgagactccatctccaaaaaaaaaaaaaaaattttgatgtgtgttctttgcttacaaagatgtctgtggtaatgagactcaggagcaccctgtgatcttatggaaatcttttgaagataccatcatagatccctcccttggccaagagtaggagtatcctgcaaggagatgggaactccacctcagacatcagcaatcctgaggagacattgggaacaggcccctccgtccttagatcacaagtggctgtgatctaagctgtgccgtggtatggcatccaccccttaggggccacacttaggatgttggggtgctgtggcactttaacttggaccccacgcagtgtggggtgtgctggatttaagtacagatgccacgaggtgcagttggataactgtttgtccatagctccaaagaggaaatcagaggtaggtgcaaggccttcatcagggttcatttattcctaataatagtctactctgttatattcatgtaggagtatttcttctgatgcagttgggtttcatatagccaggtgtaaggaattaatctttatgttgaagtcatttgggagcctttctttgtgaaaaatcaggtcatttttggattaagtaatgtgacagggaagtggggagctacttcggggtcaagtttttgtttaggattcagagccatttggaatttatcatgtttcagtgaggcttttctttccaggtcagaaaaattccttttggtctgagtcaacatctcttgtttgctagggagaagtaaacaggagagggtagatctttcttctcttaggctggatgagtaaccttaaagttcttccaggttggttgttttggattatttcttttataaatagtagagaaatattcaacattttagttagtttttaaaataccacccaatattatagttaccaggcctcagaggaggtaacctctccagaggagaggcaggagatctctgcctggagatgtccgtgaccctattttatgtttatgggttgtttttgtttcctttttcttttccttttttgagacagggtctctctttgtcacccaggctggagtgcattgatgcgataatagcttactgcagccttgacctcctgggctcaagcgatcctcctacctcagcctcctgagcagctgggactacaggtgcagaacaccacgcctgactaattttatttttaatttttttggtgggattgagattttgctgtgttgcccaggctggttttgaactcctggcctcaagcaaccctcccgccttggcctcccaaagtgttctgggattacaggtgtgagccaccgcacctggcctggttgttctttctacagctttgaatctagcactgcctggagtatggaatggaatgcgtcttagattgtttatctgtgataggcaaagtggtgcaaagtgtgacttcttcatagtgaaattagtctagcatattacctggtggatgatacagctttcactattccatttttttttctgttctaagaagaaaaggtttttattttaaaatttattttatttttaaaaataatttccacttttaattaattaattaatttatttttgagatggagtctcactctgtcacctaggctggagtgcagtggtgcaatctcggctcaccacaacctccacctcttaggttcaagtgattctcctgcctcagcctcccaagtagttgggattacaggtgcctgccaccatgcccggctaatttatttttgtattttagtagagacggggtttcaccatgttggccaggctggtctcgagctcctgacttaaagcgatctgcctgccttggcctcccaaagtgctgtgattacaggcatgagccactgcgcccggcctcagcttttattttagattcagggatacttgtgcaggtttgttaatgggtatattgcatgatgctgaggtttggggtacgattgattccatcacccaggtagtgagcatagtacccaataccttttcaaccatctcctcaccctcccttctccatctagtagtccccagtgtttattgttgccatctttatgtccatgtgtacccccttaaaaaaggccttttatcttgggtgttgcgacagtgtctcccttcctaatgtgtcaccttggcaaacttcttggaagaatcagtgtgtcctaaagggaaaatgtggatttccaggttagcgtctgagcctaagctatgcttgactgtgacattatgtggtgttgatctcaggcaagtcaagtgtcctattccttagtctcttcttctacaaaatacagttgaaaacattgatcttgcaggattgtcacatggaaaagcaggtgtcatgtcagaagtgctctgtaatcagagtgagggtgaaggaatggaatggattaggaggtgggcgcagcaccaggtgcctgctttcatggtgctgatggttgtgaagcttgcagatacagatttgagttctggagcagaatatcctgtagctacgtccacactgtggtttagggacttaggcttggattattccatattcactaccttccctcagtaaagccttctgttttctgtctaccagttcatcaggtaacaatactacccactgttcgtacccttccacactcttagatccatcgggactagagtgaggagaactgggttggccaaggtgagttttggcttgccctcttttttctggggtatgagtaagatatttatcggggcttaagctcacttcttctgcctaagattcctggccagtcacactggggacccacctctgcaggtgaggacgaaggtattcatattgcaagttgggttcgttttcattgcaagggaagagtgtctggatgtcttctttccccacatctgaaatgtttcctggaatgtaaactagaataatcacacagcatttcttgagccagctctgagggacaggataaagggtgaatgggggcgttgatcctgacatggcctggcatgtccacgcatttcttttggcagctaggagagcataggcctgtgtttgttgattatattctcctagaaactcttgtgtaagttctttcctatacccaataggggtattatttttatttttttctgggacacactagttatgcaacacagtgctttgtttgttctatgctaaaaaaagctgaagatggcccctgcctttggagaccttatctagagtaaaaaaattaccatgcatatacaggaaataggctattaagtgacaaatgtgttctaggtaaatatttatttattttgagacagagtctcgccctgtgcccaggctggagtgcagtggcaccgtcttggctcactgcagccttcacctcctgggttcaagggattcttctgcctcagcctcccgagtagctgggattacagatgcccatcaccacgcccagctagctttttgtatttttagtagaggtggggtttcaccatgttggccaggctggtatcaaactcctgacctcaagtgatccacccgtcttggcctcccaaagtgctgggattataggtgtgagccactgcacctggcctaggtaaatacttcagagttggagcacatttcatggagggggagtttttgtttttacttttttttaggggtttgggtgtgttacccaggctggagtgtggcaatgcaatcttagttcatcagctgccttgaatttttgggctcaagtgatcctcctgcctcagtctccggaatacctgggactacaggtgtgcaccgtgacacctggctaatttttaattgctttatagagatggagtcttgctatgttgaccaggctggtcttgaattcctggcatcgagtgatgctcctgccctggcttcctggagtgctgaggttatgcgtgccagttactgtgtccggccaaggggatggtttataaactggatttgggaagatacatacaatttgggtagttggaactctgggggtgaaagctttgcagatatgtggaagagaataaacaaaaacataagggtctcttcacttgaccagtatttattgagcatcttctctgtctcagacactgttttgggtgcttggggtttatcagtgaacagaacaattgaacatcgaaatacggtgaggcaacgctgaggctggtcacaaaccggcttgggatgagctttgagtgcttggccaagaacactggattttgacttttagaaagtagtgagtcattggaaatgactcatattacaggacagtcacatgataaagggaatattttgtgaagataaatgtagcaagatgtggcacaggattgaagagatggggtctagaagtgaattggacagtcattttattgggaacaggagaggaagagatgggaaagaaagaaatgtattcactagttatttaagaggataaatatttaaaactgcacgtatatatttattatggaatgccaggaaatatagacaagcactgccagttgtgcatagcagttcttttgtctatggctgtagataatacattcttcaaactagggatgaaacaaagtcttatgtaacagtcggtgaacaacattgtgaattgctctgttgtgtttaattgattgaatgtgttcaacctgtttcctgtttttacgtgtatagctagttcccattctctattgttatatattaaaatatcccatttaatatatgcatcttggctatgtatcttcctccacattttaaatttctggatcaatgggtatatttcattttaagcattttgatgcgtggtaccaaattctagctccctgtccccccgcctctccaaaaatgtgtgcaaaatactcaggcgcagtgtgtgagaatgctggcttcctgtattctcatgaaccctgggtcattaaatttgtttaaaattaatttggtttcccaatttgttatgaaaaactcaaatagtagctgagagaatcatacaaagcacagctgtgtcagttgacctctggttgggtttggccagtgggaggtttggtgggagataggaggccccgggatgacatagccccaaagtagttcccttctccctctctgttttgggctgtgtctctgcagcaaacaagtctctccccaaattccagctcctgcccctgagtcctccatggctcccacttccgccaccctgggctctggtgctacctccccttatcccctcagcccaggggtagtcatagcttcctgctactgctaacctgtgtgtggcccccgcctccaccaccatcctggtttagagtcacgactcttcttacaaatctttgtaccagttccttgtattaacttccctctctttaaaatacttgagatgatttgcattttcctgttcgcactcctaataatacatatttattcctgcgtgtgtgtatacaggtggagcatctgttatctgaaaatatgaaatgctcccaaattggaactttttgagccctgacatgataccacaagtggaaaattccacacataagtacttaacacaaacttggacttaatacaaacttggtttcgtgtaaaaaattatttaaaatattgtataaaattaccttctggttatgtgtataaggcatatttgaaacataaatgactttttttgtttaaatttgggtcccatcttcgagaaatctcatgtgcatgtaaatattccaaaatctgaaaaaaatggaaatctgaaacacttttggtcccaagcattttgggttaggggttctcacctgtatgtttatatgtatatgtacatgtgcacatgtacatatatgtgtacgtgtgtatttttttgcactatttgcagacatggcactttaaatacttcagaacacaactccttagaataagggtgtttccttaaatatccacaaagctattatcacatggacaattaagaatcatttcctaatattatctcatattgagctcatattaaaatttccctcattgttcccaagatgtcttctacagtgacttcttttttaaacccagcaaggacccaaacaccactcacaccttgaatttggatattcctccttaatctttttgatctagaaaagtccccaggttatttttttaatgacatatttttaacgttttctcttgaaaaatttctaatgtacactttagtgaaatgcaccactgatactttagattcaccagttgtttacatttgctacgttgtttttctatctctataaacataaagatacacattagtaatagtatgcatttttttgtcctgaaccatttgagactaaagtacagatattataacacttctcacccttattacttaagcatacatttcctcaaaaaatgactgttcgttgtataactagtacaatgatcacattcagaaaacttaccaatgtatcattccattacctaacttaatttgacaaatttcttcagttgtcctttcctttttcatagtactttttctttccagatgcagtatccactccaggatcatacattgcacttagatatcagacgaagtggacttttttttttttttcctttaaagatcagtgcaattgcgttgtaaagacaagacaaaaaacaaagaaaaactcatattctggatttgtctgattgtttccttatggtattgtttaccttggttctctatcccctgtatttcctgtaaagaagaagtgaggctatgttttgattaggttcaatcaggaggatgctgctatcagtaggaatgaagaaggcaggaagttggtgttagagggaagataaggaatataagctttatctatttgaagtaaaataggactccataaaaacattgtccagtcataagtaattcccaaatgggtattcttttgtttgttgcataaaaatttcctggcaggcttttaaaacaagctccttggaggattcagactgctcccagggtgaggtgcagtgagaggtggatgtttgaagtgggagtgctgggagggttctggtctaaagatgtggcgttagcaatcccctgcacagagcctggagttgaaataacactgagaaaggactctgacagtgaacactgagattatctgtatgcttataggagacaaatatgtgtgtgtgtgttcatggtaaccattttaaagatgtaatagctaacatctgtttgatttccgaagtttggatagaagcactaaacccacgagttgttgggctaaaacgtagtgtatagaagaggcacaaggtgtttcagcttcctctctgatctcttctcgcccctcattctgaatcactggttctcaaacctcagtgtgcatcagaaacacctggagggctagtttaaatgtataaataggtggttggtccttcctccagagactttttttttggtggtgtatcccgcttgggattggaatttccagtgtattatcaggtgatgctggcctggactcccacttggagaaccaccactttaaatcatgatgtgattagaacatgtaatagaatttttcatggtgtggcttttcagacttggttttaacagccaacactttttttcttcttttctttttttttttttgagacagggtctcactctgtcacccagactggagtgcagtggcacgccactgcttactgcagccttgacctcctgggctgaagcgatcatcccacctcagcttcccaagtggctcggaccacaggtgcgcactaccacacctggctaatttttgtatttttagtatagatggggtttcaccatgttggccaggctggtctcaaactcctgacctcaagtgatctgaccacctcagcctcccaaagtgctaggattacaggtgtgagctaccgaacccagccctaatttttaaaattttttgtggagacaggatctcactgtgttgtccaggctggtctctaactcctgggctcaaatgatcctcctgccccaccctcccaaagtgctgggattagaggcgtgagccacaacacctggccctttttattaaaatactttatggatctcgtctttttattttaattaattaatttaattgatttttgggacaaggtttcactttgttaccccagctggagtgcagtggtacaatcgtggctcacagcagcctcaaccttccaggctcaagtgatcctcatgcctcagcctcctgagtagctgggactactggtacctgccaccacgtccagctaagtttttttgttttgttttgttttctgtattttatagagacagggtcttgccatattgcccaggctggtctaggccctctgaactcaagcaatctgccatggcctcccagagtgctgggattacaggtgtgggccaccacgcctggcctggatcttctctttatgtactgtattaacaaatgaagctgttgagaagaggctgggaggaggggctgtggaaagaagacaagcaaccctgacgcttcagattggaaactgccagtgttagtctgagaaaggacttgggaataaatcagcagacctgggctggagtcctggctgccagcatttatgaattgtgacctcttgccggctatttatgctctctgagtctcagttctctcctctgaaaataggaattataagccctctttccacatgagataatgcacatgaatgcattttttaaaattgtaaaatgcagtgcagatctaactggtggttactgctgtctcattcttgccttggctgtgtcctgtgccagcgctgtagtctgaggccattcccttcatttctgtagaatggtggaggagttgaaggacttccatgactttgtgttggcatgaaagtcatgtcagatcttggaggtcatcgatgggctgatttctcatattattgaataatgtgtgaccctgtgagagattatgtgctagttctaataagactaaatgccagaaacttatttccttgaggttggacttcacctggtttcatgcctccattttcacttttgattgatgagataaatgaagctatccacctgtcaagggaggcagcaggtttgtggtttgctctgtcttgtgttgtggtgctgaggttttggcattggtattgggtgtggtttggagtggagaatgggggccgagcagtgtacttagcatgagatattagtccctcccttgtggtgatacaggtcattattttgttgttgaacatcagctatgacatctgactgtctgtcttctccctgtattgagaaggcaacacaaacatttgtataatgtttagcagtgttcctgtaacaagattgaagatgggtcctatgtttcagtttattggaaaagattggctttttttttttttcctgagacagggtctgaacttgttgcccaggctggagtgcagtggtatgatcacagcttactgtattgtccacctcccgggctcaagtgatcctcctgctttagcctccccagtagctgggactataggcacacaccaccatgcccagctaattaaaaaaccaaaaataacaacaagaaaaaacttatttgtgagatggggtccccctacattggccaggctggtcttgaactcctgggctcaagcaatcctcctgcctccacctctcaaaagtgctgggattacaggcgtgagctactgcacctggccaatcagcatttttaaaaatgaagctgattaaatcaggaaaagtcagaattgcatgtgtgatatctatcttgaagtgctaatgattcattttttttttaagaacagaacttcagaatatattctaaaaatgtttgtttttggcttaaataaattggagagttacccagagaatctagagagaagcatagttcctgctgatcgtgctcttttgttgactttttaaaatgaagtgttttagaagtctgaggggcatttttaaaaacaaaacaaaaaaatgaaatgttttctatttgttatatcactaactaggactttatttgtcttgttaacttaactatcatgtggctaatctggttggtggatgctaaactgtaaactgtgtgccatggttattatttaaaggacttttcaaacttgtttctctttagtctttgtgtttctcaatgtgacatgtgcacatgatcagatagcactactaggattgttatgaaaaagagcagagccttctttgggagaggttgccttttccaactcttgctcctggttcttttgatatttactttaatatttttatgtaaattgcttatctcgtttgttttttcttgttgtttgtcatctattgagttaacatggaaggtttaaccctatttcactaccgtatgtgtgctatgcccccactcacaggtagccatttctaggatctctgtctctttgtgtgtgtttgtgtctgcctttctcctccctctgtcacacttactttttagaccactttgttacaaaatatggttacaaatttgattaaatattctaggttcacattatttttattattaaagctacttacagctgaaccatgtatgataccttgatcaccttttctttccttcacaacttttgtgtttttcctgaaatgaggaatgttttttcctttggttgatcttctgtacatttataactaattagccttagccttagtcagttgttaaaattgtgtcttgctgtgtttagttgcattgggtactctttcagtgccattttgaagaggtcacatttggggtgtctggactggtcactctgctccaggtttgcagctgacgtcctggaatatgggatccaccttcaccatcgtcccgggagctgtcttctgtgttatgtctcctgttttcatatgctgtgtcattctcattcatggtttattgccttattttgttggaacacatcttccacttacaaaggggtaatgtttttggaaacgttgcatttctaaaaaaggtcttttttctaccttcatactttaccggtatttgggcaagaaatggaattctaggatgggggactatttcttgtaggagttttgaagtcactggtagatgattgtctagattccagtattgctgtgactccttttccctcactgtggcctgtgctttattttctggatgttctccttcccttccccccaccaatcttctgtttttcttctgtgttctgatgtgccttggtgtatgtctgcttttatacattgtgttggggtctctatggaactttttaatgtggaaacatatgtcattttggggaattaagttgaaattgtttttggttatttctctgttttcccaattctctttttctagaactcctgttattcaagttgcttgacttacttgactggtctaattttattattagccttttttatcttctttgtcttttttttttttccaacttcctaggggagatattttcaacttctcttaattttcctattgagctcttagtattttgtttagttttttttggacagagtgtctgtcacacaggctagagtgcagtggcccagtcgtaactcaccatagccttgaactcctgggctcaagcagtctttctgcctcagcctcctgagtagctgggactgtgggtgcatgccaccacacctgacttatttttatggtttttttttttgtacagatgggatcttgctgtgttgcccaggctggccttaaactcctggcctcaagcagttcacctgccttggcctccaaagtgctgggattacaggaatgaaccactgtgcctggcctgtttttcatattttaattccaaaatactttttttaaaaaaattctctctcaccacgtttctttctttcttgctttcctcccttctcatattcctctgcaacctgaatgtaccaccatctgacctctctcaggataccagtgatggatttttagtagcatctttttatacagtctctggttctttcaagttgtgtttactatttgttttgttctctcttccatccttggggtgttcttaaaagtctgtctctccatggttggctctgacctaaggcactaatggtaacttgagagcactgagttcaggcacgggcgtacactgtgagcttcactgggtggtccctggactgggccagattcccccctgccttttctctttagatggatagaggcccagggaaagatcttcccacctctagccttggggggataagccctggctggcattctgagagcaagtggaagcagagggctggatttttctgtaatcagtacgtaaatattcacttggctcctctcattttcaacaaggcacctctacaattgttcctcctctagtttctcagtccagacctgctgtctgagcctgcagtgagccgccaggggctgggaggggcagtcactgtgctctctggaagcattgggaagctggggctttaattactacagactttcagacagtattgttatttttcctcccatcttttacatttattattattttaattttattattattattttttctgagacacggtcttactgtgcccaggctggaatgcagtgacgcagtcatggctcactgcagcctgaaattccccagggtcaggtgatcctcccacctcagcctcctaggtggctgggactacaggtatgcactatcatgcctggcttttttttttttaatattaaaattgttttattatcattattattttgagacggagtgttgctgttgcccaggctggagtgcagtggcgcaatctcagctcactgcaacctctgcctcccgggttcaagcgattctcctgcctcagcctcctgagtaggtgggattacaggtgcccgccactatgcccggctaattgttttgtatttttagtagagacttgctttcaccatgttggccaggctggtttcaaactcttgacctcaagtgatccacccaccttggcctcccaaagtgctaggattacaggcgtaagccaccacacccagccaaaattgttttattattatattttagagacaagctcactgtagcctcgaacccctgggctcaagagatcctccaccttagcctcccaagtagctggactatgggcacaggtgcacaccaccacacgttggtgatttttccagtttttttgtagagatggggcctcactacgttccccagactagtctggagctcctgggcttgagtgatcctcctgtccctgcctcccaaagcactgggagtataggcataaactaccgtgcctggccccttcccatccttgttccggtgttctgacattcttggttctccccattccagagcctcttaccggctctgttggggaagtcttgctgcttcttggctttccccacagttaccttggggttccctttcttggttctgcaaaatgtgtcgcctctgggccatctgcttctcagcttccaaaaactgtgtttccctcatttccctctgttctctttgtctttgtgcgattatgcttggaaacaacaacaacaacaacaacaacaacaacaacaacaacaacatccccgcgtgtattgtggtttcagtgggctttcagtaggaaataaaaataagtgtgtctttttgatatgatgtttttaccctttcatttttatctttgtgttcacagcgttctgaatcacctctgccattcttccctgctgctcacacccttccccctgctcagggtcctcctcttgtgccctgtccctctggtctgctcattctgctaaaacctccccatgaagacctttccaagtgagagtgatctttccttcctgaattcacaaaacattttttttttggtgtagttttctttgaacacgtggtctacctcttttttatgacttatattttgtcagataaattttattttatttttgagatggagtctcactctgttgctcaggctggagtgcagtggtgtgatctcagctcactgcaacctccgcctcccaggttcaagtgattctcctgggactacaggagaaagaggagctgggactacaggcgcacgccaccatgcctggctaatttttatgctttttgtagagacagggtttcatcatgtcggccaggctggtctctaactcctgacctcaggtgacccacctgcctcagcctcccaaagtactgggattataggtgtgagccactgcgcctggcctgtcagataaattttaatttctgatgttgggtgatgattgtttctttgccttcatgcaatgctttgcatgtagtaaatactcaaattttttttttatcaacatagatttttttcagtgatctttttctggtcttaagttagacaggatattgaccattgctgtatgccatggttaatgaaaaagtagggtgctatttctagttgcagatacttttcttgaaatttgcacatgtgggtaatatgcggagcctatgcattatacatgtcataactcacaaaagctcgccttaggactttgcactgttttctcttaccacatcctggagtagagtgggcctcagcattccttgcaacttgcatcttgtagagttacctctgcttccattcttagtcttaggaaatgttttgtctagcactaggcaaggtgaagttgatgttctttatctgaataagagcagtgattcttcatgtggttttgtctccaggtttcttcggtgggtttggacctatccttgggagccttgccccatgaggacattcactgcttgatcatctatttgatggatgaactctgcccctcgtttattgctgtgtgtgatggacttttggttgtcataatacacaattattgttagtgtttaactcttttgttattttaaatggacatatcctgaatgagaaacattcttcttcttttttagttgaatgttctgtcatgtttgtttattcacccaatgactgatacaattattgtagaattagaatttattggtagtataaaaagtggcttatcataacttttatcttccccctaagagacggggcctcactctgttgcccaggctggagtgcagtgatacaatcacagctcactgcagccttgaatttttgtgctcaagggatccccctgccttagtctcccaattagctgggactgcaggtgtgggtcactatgccttggccttctaaagttctgggattacagggatgagccatcatgccggaccttatcacaattttttgctcagctacatttctgagtgtctatggactggacagtagagattcctactgttattattttaaactttttaatgcaaactactacaaagtggaatcaataagtatgcgctaactttttctcactggatactggactcttcccttgaaaataaagcaagtcctctgttcattgaaagagaattatggtatgaaagctgccagttaaaatttcccaagagaccactgttctacggagttgtatttttcagtggcaaaaatatccttcctggtttttaaactcttgtgggaggaggtcatttttatatgtttattttttatgttttatttattatttttttatttttaatgcagcatgctctgttggggttactgttgatctcctgctcagttcttttcaaaacgtcatatccattcagcacatttttgtggagtggcatttaataagtggcagcctgatatttgccttggcatgatgttatcatgattgcttggcatagctgactgttgagtcaggacccctccggaggcaggagtcaaccattgactctcaaaattagaaaagccttgatcagttagttggaggattacaagccaagtttatagagtatttcaaagagagggtaacatattctgctgatagaccaaataagatgaggacagacaacagacttttgtgttaagcatcgtggaggctgctgtggatatgatggaagaggaagcctgattggaatggggttatgggaggaagacacacttgaagcaagtatagacaatttttaaaaaaaatttgctgtgaagatcatcaaagaattggtataataaccggaaggtaaagtagtgtcaacaaaaggttttgtgctgcatatgtaaaaataattcacagcctttaaaggctcacgcttgacacctgactctatcttccatacgattgtggtttttaggaacattaacagtgggacaggctgggctcagtggctcatgcctatcatcccagcactttgggaggctgaggtgggaggattgcttgagcccaggagttggaggctgcattgagctatgattgcaccattgtacttcagcttggatgacagagcgagactgtctctaaacaaaagaaaacagtgggctggagttagactgctgatctgctttgggggtgtgatggtcaggaaaagctcttggagaagaggatgcctgagaagtcttgatggacagacagggctggcctggagggtaaggtgtggtccaggcattggaggccttgggcacagagtggggggaaaatggtgcagggcctaacaggctgtgaaagggaaagtgctggggaaaaggtggaaatgtagcaagttctgaaggatgaagttatgaggttgagaaagtccataggtgcggatttatttccaaggggtggctacaaatattatataaaggctgcagataatgatctcatctggagggagtgaacaggattaggaggcttaaagaatggtttcataagccacattttggaggttggtgtgcttgtgtgtgtggaagtattttagaaacgaaagttgatatttaagttgattgggtcacccttgagcttgcttggtgggaagaggtgggcaggatgtggctattctaagtggccaggggacacctctttcttattcacccccaggacattatttccaattttccttgaagaggaaataccatttaccatcagtaaatggttttgggacttcattctttggggactcaacacatctggagatgccaaattctggagctgtctcagtggcaggtgtcccagggactcctggatgatgttgtaattgggattcatgtgcagtcagaataggccccacaaatgaagaggatgccaacgtgtgtgtgtgtgtgtgtgtgtgagtgtttgttttacaaacttactctctgtgttctagataaatgattcctttcatagaggtccagatagatgagggtgcagaggaactctgttacttgcaaaatggttttaacggtaatgtttaataactttgaggattaaggtctgagttacttgctgtgctggttaaaaagtgacaaggattggtcattctgcatttttaaaataagtgttccgtttcagtgatacttaggcatgctttgttagagatggacttggagagcttcttaataatatggattctccccgcacccctgctccagggtcttagtcagtagatctggaacagggtccaggaatctgtattttaactcttcattaatcattagcctccttcttccaatctttgcttcaggaaagaactgtatcaaacatcatctttaggtatgaagaatggaggattgaacttctggatagcaattgtgttgcagaatgaaagcagtagggaatggtgaaacatgcaatttagtatattttcatctgaatatgtacgtaagagtgatgtagaagttcagaaacacacaactatgtttcttcttcagatcatttgaaagcagagttttaaggattttaaaatatacgtacaccatatagaagtgtataaaatttaaaatgatgtccttttttttccttctcctcaatcccactgcaggataaccactgcaaattttgaggggggtgtgtgtgtgtgtgtgtgtttacgcattttaatatgtgtgtgtgtgtgtgtgtgtgtgtcattttgtctctgtaaaaagaggctcaagccacacaggatgtgctttgttcactacggtcttgtcagcatccttctgtgtccctatctttagacctatttgtaagaaacacttggagccaccagggtgtgcaaactactttttgcagataagcaaaaatacaaattcttcagacacataatatatgctgtttgcttattagaatatttctgtagattgcattgggggttaataagtataataagtatttcatatattgggcaataggaaatctagtatgctttagagaaatcagtattacttatgcagtacatattgcaggtttgtgcagttcctatcataatagagtatcagcatcagagccaaagggaagagtgtgtatgagtcactccatcataaaaggagcagtgactcaataccaaacttagggtgctgtctgaatttttaatcagttgcagtattgttgatatgaggttgattcctttttatgggcaggaagttatcacggtttaaaatgtctaattcccttttggtgatgctaacttgctatattcagtgtttctgttctttcgtataggatccaaactactggatacaggtgcatcgcttggaacatggagatggaggaatactagaccttgatgacattctttgtgatgtagcagacgataaagacagagtgagttcaggtcctggggaacctgttctgaatgcattttttttttttgaggactagggagcgggtgcgattcttttcctttctgttttagacacatactttaaattatgtgtgggccacccactctagtatattttcttttataataagtatcatgaatcttcactgtcctgaataccaaggtataatgattttcttgatacctgggacttaacactaggttttggggttttaaaactacacttttacaatggaaatatcacaaaaagatttctatgccatattctgccttaatttaaccaaacataacatctttcttcacaactcgggcctgtccttatcatctccgtgtatacaacatgcagccattctgcattctggtcccagcgttggccctgagaagatccatcccaaccgtggccttggcggtgcaccgtgctcctgtgcagtgggcgagtgtgtcccaggcagcctaccctgtgcagggcctggccctcaggaagctcagccttgctgtgcgatgggccatttgtgtcccgggcagcctctcctgtgcagggcctggatctcaggaagctcggccttttctccatcagtgctctgatgctctgtgtgtgcttccccagtctttactgtggtctgtgagtttggctcctggacctatccacctactgctcttcagtgttccctcccactaccccactttttttctgtactcttgagaggaatgaggaagaggaagaggagggggaggaggaacgttcagcgttttgagaatgcgtgacaggatgttcggctctggatgtagaagtcagcaaattcttttttttttttttttttgagatggagtcttgctctgttgcccagactggaatgcagtggcgtgatctcggctgctcactgcaacctctgcctcctgggttcaagcgattctcctgcctcagccttttgactagctgggattataggcgtgcaccaccacgcctggctaatttttgtatttttagtagagacatggtttcaccatgttggtcaggctggtcttgaactcctgacctcatgatccgcctgctttggcctctcaaagtgttggcattacagatgtgagccaccacacccggccctggccactccttttgtatttggcttataaggaattgcagaagggctcatagccacatacatagttacatcagcatggtagtatggaggcagcggcctggtcgactgtctcctaaaacctccctgcacagggtatttaaccagctaggttacatcgtgaggtcagaagatggtaagatcacccagatattcactctgcttcctactggggctccttctcattcctggccctctccccaccggcctgctcttctttccctcagctgtgagctgggtgcacacagctgttgtgtcttgttcacacctatattcctgacagttagcatcatgcctggctgagagttggtgcatatcttaaatgttttcttgaaatttcaagtaagacaaaaaatatcaaataccaaatagtgtataaatttggaagattagattcactgttgcacctgtcatggtggaatttgtcccatgtggctcctgtgggtcaggaatacattgtatcaaaaaatgcagatcctggctaacaaggtgaaaccccgtctctattaaaaatacaaaaaattagccggctgtggtggcgggtgcctgtagtcccagatactcaggaggctgaggcaggagaatggcgtgaacctgggaggtggagcttgcagtgagctgagatcacaccactgcactccaacctgggcaacagagctagtcttaaaaaaaaaaaaaaaaaaaaaaaagcagaagttttctgccgacttatgttctgatgctatttttcttggtgccgtttctccttcttgggcttttgagtgagccaggcttagggtaactctgaaatccttttctgcagtccacatgaagagtaccatctttcatttattgtgtggctcaattccaacactcaaggcaactacagagatttatgaagaatttaaacaggtgctctttttccaccagagtattagaaagcgatgaattaacgtatcaatctttcaatgtcttcctcttctcccttcttcttcgtccttcttttttttgtttctttttttttttcttctccctctctttctcagtctctctctcttgctgttacttcctatgtaaaaatagcacaactccttgtgaggaaaaattggaaaatgcagaaacatacaaaggaattaatcacctgacatcctgctattgctgagagcttatcactgttgtttgagattttcatcctgactcttccctttcttcagatagatagaaacacagtctttttcttttaaataaagagacttgaatagtagttttttgttttgaggttagcatatatatatttctgtgtccatgaaccatagctatgccaacatggctgtgtagtcttttgttttaatttaatttatttatttagagacccaggctggagtgcagtggtgtaattatagctcactgcagcctcaacctcccaggttcaagtgatcctcctgcctcagcctcttatttttaaaaaagttttattctagattcaggggtacatgtgcaggtttgttatataggtaaattgagtgtcataggggtttggcatacagattagtcaccccaggtgataaacatagtacccaataggctaattttttgatcctctccctcttcaagtaggccctgctgtctgttgttttcctctttatgtccacgtgagatcatgcattatttggttttctcttcccatgttagttcacttagcaataatagcctctagctccattcatgttgttgcaaaaaacatgaccttgttattttttatggctgcctagtgttccatggtatgtttgtaccacattttctttatccactctaccactgaaagatatttaggttgattccatgtctttgctattgtgaatagtgttgtgatgaacatatgtgtgcatgtgtctttatggcagaacagtttatatttctttggatatatacacagtaatgggattgctgggttgaatgataaccctgttttaaattcattgggaaattgccacactgctttccacaatggccaaactaatttacattcccaccagcagcgtataaacattcccttttctccacacccttgccagcatctgttattttttgacttttaatttttttcttcgaatttctcacgcgacacggatgtattgttttatttaataattgccactctgactggtgtgaggtggtgtctcattgtggttttgatttgcatttctctaatgatagtaatgttgaacattttttcataagcttattggccatgtgtatgtattcttttgaaaagcgtctgttcttgttctttgtccactttgttttgagatggagtctcgctcttttgtccaagctggagtgaagtggcacaatctcagctcactgcaacctccatcccctgggtttaagcgattctctggcctcagcctcccgagtagctgggattacaggtgcccgccaccatgcccggctaatttttgtatttttagtagatatgggttttgtcacgttggccagactggtctcaaactcctgacctcaggtgatccaccctccttggcctcccaaagtgctaggattacaggcgtaagccaccacgcctggcctctttgcccactttttaatggggttgttttatgcttgttagtttgcttaagttctttatagatgctggatattcaacctttgttggatgcataatttgcaaatattttctcccattctgtaggttgtctgtttactctgttgatagtttcttttgctgtgcagaaggtttttagtttaattaggtcccatttgtcaatttttgtttttgttgcaattgtttttgctgtcttcatcatgaagtctcgtccaggacctatggtcagaatggtatttcctaggttatcttccagggtttttatagttttagattttatatttaattctttaatccatcttgaattgattttttttttttttttgaaatgaagtctcgctcttatcacccaggctggagtgcaatggcgcgatctcagctcactgcaacctctgcctcccaggttcaagtgattttcctgcctcagcctcctgagtagctgggattacaggtgcacgtcaccatgcctggctaatttttgtatttttagtagagatgggatttcaccatgttggccatgctggtctcgaactcctgacctcaggcaatccacctgcctcggcctccaaagtactgggattacaggcgtgggccaccatgcccagccctttgaattgatttttatgtgtggtgtaaggaaggggtccagtgtcaatattcagcatatggctagcctgttatcccagcaccatttattgaatggggtgttctttccctgttgcttgtttttgtcagctttgtcaaagatcagatagatggttgtaggtgtgtggcattatttctgggctctctcttctgttccatgggtctgtgtgtccatttttgtaccagtaccatgctgttttggttactgtagccttgtactgtagtttatagttgggtaatgtgatgcctccagctttgttctttttgcttaggattgccttggctattcaggctctttttcagttctatgtgaattattctttttttccaattctgtgaagattgtcattggtatagtttgataggggtagcattgaatctgtaaattgctttggacagtgtggccattttaacaatatttgttgtttcaatccaagagcatggaacatttttccatttgtttatatcatatctggtttctttgagcagtgtttttaaattctcattgtagagatctttcgtttctttggttagctgtattcctaggcatgttattctttttgtggctattgggaatgggattgtgtttctgatttggctcttagtttggatgttgttggtgtgtaggaatgctactgatttttatacattggttttgcatcctgaaactttgctgaagttgtttatcagatcaaggagcttttgggcagagactgtggggttttctaggtatagaaccatatcatctgcaaacagggagagtttgacttcctctcttcctatttgggtgccacctcacctcttgagtagttgggactataggcatactgcacgatgcctggctaatttatgtaaacatttttgtagagacagggtctcattgtgttgccaaggcttgtctcaaactcgtgggctcaagtgctcctcctgcctcgacctcccaaagtgctgggactacaggcatgagccactgcgctcggctgtgttttgatgtatggattcatgtacagtctcgttgtacttgctgtggacacttagatgactatggagacagctgctgtgctcacctgtacgcttttccctttggcactctctgtactctgagcagctgagatgagcacgcctgtttctccaccacgtttcctttttacttttacagacgcaggttttccctcggggttctgccatccttctttacaccttgactttgtgcctttccatagagctagcgaggcgtggcttataacatgttttctgggatatgcctggccctggtgcatggcttggaataacctgttgtggaagtttggttgttgcacaagtaggatttatggggctgtacgatctcaatgcttctgagaatgctgaactcaatggactcatttatgctcagcataatgtagtaaggcctgaagggttatgcagtaccaattactgtttccatttgtccccttgcactccagctgacattagatgccctcagagtttatgtttggagccagtagaacatcatgatgtagatgttcagcacaatgatttttgcagtcttttgaaatgtatggagacatattttttggtctagcatatggcctttttggtggacattttatgggtacttgaaaataatgtattctgcagtcattgggctattataaaaatcagtgaggccatccgggcatgctggctcgtacctgtaatctcagccctttgggaggctgaggtgggcagatcacttgaggtcaggaaatcaggatgagcctggccagcatggcgaaatcccatctctactaaaaatacaaaaattagctgggtgtggtggcatgtgcctgtaatcccagctacttgggaggctgaggcaggagaactgcttgaacccaggggacggaggttgcagtgagctgagatcgcccactgtactccagcctgggcgacatagcaagactctgtctcataaataaataaataaataaataaataacatgtaaaaatcagtgagggtaaggtggatgatgttgttttggatctttactgaataatgtgttattcagcaactgaaagtcatgcactcttgttttgacacaattaactgttagattatacacaaaaccaagcaaaaggcaaactatgcttgatctttttaaatagtggcatattaaaattatacaattcttagtaaacgacgttttagattttgtatccttctgcgaatttgataataaaaaatatattttctagaatcttttatcatatttcctatacaaattaaaatgtcctttaacctgagaaaaatattttaaacattaataggtgaaataacactttagacaattttatatcatgttgattgaaatcagtttccaaatagaaaaatgctagagcaccttataccatagactgaagtagcttttaaagccgttttttatttgttcagaaatactttaaaatatatgcataattgatttaaatattgttgagtgacattcctagattaaagtgcccattataagttgaaactgtaagaaatatgattagtagcttagactcacaacacctagtttttcataattcacacagattcacagtcatggctggacgcattattcagactgagggatcgtgtgatgcagtcggtcgcacggctcttttccgtggctctgacattcgatcctgatttaatcattctggagtgttttcaactatttttggcagctgctccaagtaaggattttgacacttgttttgctttttggtttaaggaaaaaagaacaagcattatacctctcttaaataataacatgtatctaaaataatgtcctgttttgtgaatatcccctggatgcatgttgaaaacgtagatacctggcctgggaaataggatctctgtgaagggtcctgggcatctgcattttacagtccccctcctgctgctatttaggctcactaagttacaaaaccacagctttaatggctctgcctctgtagcagggaagatgctcttgaagatgcaaattttatacttggtcgttgtgaatttgtaacattattaaaaacttattttttatggaggggaagaggcagtattttaaatgatagcaaaagaaaattaaagtcaagtactaaattacccctaattttcctcattatcctttaattattaacgttcagggcacagcactgaggaagttttctgttagtgcctatacagttctcacttccaggatttacccaaatttgttcaaatggtactattatattaccctggccccttggagtaggtttgattttctaaggtgtagaatactctagatctctttgagtgtaaaaaggtactttgttttgtttgtcctttctctgtgtttctggaacagtgatgtcgtgtttactcttagcatctcagtctcagttttctcaattgacattttgccaaattaggaaaaactgaaacagtttaatgttatcttcaccaccatttagagcagctgtcatgcgtttgtgtacgtgaactttcctgatggacaagctgtattttgtgtgaatctctgtctggtttggtctttgtcatttattatttgaggaccttcccttcgttctcaacagtgggcctaggccactcctgtttattccctgtgggtagtacagcaaatttagaaatgtggataatttttccaaatttatcacagaataaaaatacttgggattcagttcctgcgcaggccagtcacctgagactgattgtaaggggcgtaaacaaagatttcagagccaggcgccatggctcaggcctgtaatcccagcactttgggaggccaaagcgggtggatcacttgagcccagaagtttgagagcagcctgggcaacctaacgagactgtttctacaaaaaatactacaattagctgagtgtggtggtgctggcctgtagtctgagctactcaaaggctgaggtgggaggatcgcattgagcctgtgaggttgaggctgcagtgagccatgatcacgctgctctactcaagcttgggcaacagagtgagaccctgtctcaaaaaaaaaaaaaaaaaaaaaaaaaagatttcaggtgtaactgaccgggcatgtggagtcagtaggtggcggggaagtacacttttgtgtggatgatcaacagggagaaagtcttcctcttccccatgttgtcatcttttactatctttggtgctgaaggtgattcagagatgtaatatcaagcacttcctttgtcgttcttggatgtaattttgctttgagcaggaatgatgtcatgtatgttctgttttggtggtgaccctgtgagatgccttgcactatctgtttcttgccctttgtggaggaagtcttggatggaatggctgtgtaaactcagtttgaagagtttgcacgtttatgctgaagccaggcatggggaaggattgtggtggagattgctggctgctaagcctgttgatgtttatcagagaatttgggattttctagggggtgatttggccagttccgttagaaaaatgttgggaagaaaaagaaactttaaaaaacttattggggatcacaggcaggcaacaactccacgtgctgaggaaaagctaacaggggcacatttccatccttccccagcccccttgccctgggtatagtctctaacttacatactgatgttgttttggtgcctcttatggtaataaaattactgccccattaggcattttatattgatatttttgaaatgtgctataataatttttgcttttgaaatacaagtatggcagaattttcaggttaggaacatgctttaatgtaaaaagttcataattttttatttttctaatttattattttatttgtttattttttttgagacagagtcttgctctgtcgcccggactggagtgcagtggcgctgtctcggctcactgaaacctctgcctcttgggttcaagcgattcttctgcctcagcctcccgagtagctgggattacaggcgctcaccaccactcccagctaatttttgtatttttagtagagacagggtttcaccatgttggccaagctggtctcgaactcttgacctcaactgatccaccctcctcagcctcccaaagtgctaggattacaggtgtgagccaccatgtccggcctggcttttttttttcttttctttttgagatggagttttgctcttgtttcccaggctggagtgcaatggtacgatcacagttcactgcaacctccttcccccaggttcagataattctcctgcctcagcctcctgagtagctgaaattacaggtgcccaccaccatgcctggctaattttttttttgtatttttagtagagatggggttttaccatgttgaccaggctgatctcgaactcctgatctcagttcatccacccgcctcggcctcccaaagtgctgggattataggcgtgagctactgcgcctggccctattttttttttttttaagggagttcttattaatacatactgaagtttcctaaggaagtgcctttggtggatagaattttcaactatggccagtttcctttaacattaaaatatacaaaatattaaaagcaacttgagtatgtagtgaaaagacagaaaagagccataggaaaattatcgcacaaggaccgaggttgtaagttattatccagattctaatttgttaacatttcacagagctacaagctgtaaaaataagacatattaaatgagggagggcttcacatactacatttgtaacaattgtagttcacacttaaggaattcaagtaaattatgtgttagtgaaaagcagtgatacctgaaataactaaggtgttcttatttcaagtaagtagtattttagttattactaaacatgtgaaattaatttgagttcagtgttttacatgcaaaaatgggatgagttgcagggtggggatcccagaaatgtgtttaatttccattaggatgtggcatcatatgattactacctcgaattttaaaatgattgcagaaaggccgggcatggtggctcacctctgtaatcccagcagtttgggaggctgaggcaggtggatcatttgaggtcaggaggtcaagaccagcctggccaacatggtgaaaccctgcttctactaaaaatacaaaaattagccaggtttggtcatgcgcgcctgtcgtcccagttacttgagaggctgaggcatgagaatcgtgtagggccaggaggcggaggttgtagtgagccgagattgccccactgcactccagcctgggcgacaaagtgagactccgtctccaaaaaaaaaaaaaagattgcgggaatcacgtgcattaagttgttaactcccttagaatgtttaagccaccggtttactctgagttttttcctttgtgcacatgtggcttaatttccgtaagtaaacatgaattatgatatctgcctagggtgttacatggtgaccagcgtactgttttttgctgatcaggtaggtgagttgttgaattccttgccttccttcaggtgaagtggatgtagcccaggagaacatgcttttaatgcaggcatcttaatctttccatcttggggaaatatacattttaaagaagcagtgttttctgaaggcataccttatcataaatcctacttacagaaaacagtataatgaaaaacttatgaaatgtgttttctgttgtcttaatcaaaaggaataatttagttattcataaatacataccctactgtcttctgatgaatacttgagattaagattaaatggaataaattaaaacctagtttcaatattgaatcaaagctaagtggcctccctctccctctcaaaggttaataagtttttcaaaccagagtgcgtgaataatttaaaagatagcatatggaataatttcctttgcaagaaaatcagactaatatttttaggtaattcagtttactaagcacctagtttgtaccaggcattgggcttagtgctactatactctgtgtgtgtgtgtgtgtgtgtgtgtgtgtgtgtatgtgtgtgtatatatatacatgtatatatatgtgtgtgtgtatatatgtgtgtgtgtgtgtgtgtgtgtgtgtgtgtgtgtgtgtgtgtgtgtgtgtgtatgtatcatcaagccaaagtcttatagacatgtaactgaaagaccagcaggtgttaagtgatcaggtttacatttgagaaatatccccctggtggctgtgtgaagaatgaatgaggaggcagcatggaaggcagaggccagtcagcaggttttctggaaccaggattcgaatgcaggcagtgtgtggctcctgccagttttgtggaaggaggttgaaattgatggcgattgggctgggtggagatggtggggcattcaccaaggtagggactgctgcgaggttgccagactagggatgggagattacattcagtgttgtcttctgtgagtttgagtgtcttggagctgttagttcggcagctggatatttgggactaaccgtagataaatctgtgaatccaatataaatctgtgaaaagtcagtttaaaacaatgtaccaaatataatctaactttagtgcaataattatatacattagaaaaagtttgaggggtagaccaaaaagtgtcagtactggtcatctctgaggacagtgtgtgtggttcactgttttgttttcgttttcactgtccactccatattctacttctgcttaattccagtaggaaagaagcattaggtttagttataaatatagcttagaatagaaacatctttttttggactttagtatgaattggcataggaactgaatgatttaaagattttgataacctggaaatgaaataacttgtataaattgacttcattaactagatgactttattcatttcctcctaagtgagcttattttagagtgtaaagaagcaaatatttaaatttgctgccaagcagagcagcaaatggctaattaattcagaaagatgacttcccaacatttaagtgttttgtgggtactggtttggccacagttcatcaatttgtgggagcacagggcccagatatggtacaggtagagcagtgaggtgttagtgaaagggagttcggagggggccaggcctcctgcatgaaaagtgagggtcctcacgagcagtaggagctttggggtcagcctgcacaggatgggctgggcctcagtccttctagcgaaagccctcaagactttgcttatctggggccacccagtgagtcaggggacagaggttctcactctttctgttacaccaatcccaggctggggcttaataacttggtgtgccgcgctgtgcttttctgttgctttggaagtgcctggcatctcgtatggtgggctgtggagccacactgcctgcatttgaatcccggcttcacgctgtctttacttgacttctcttacctcatttttcccatctgtaaatggggtataatcatagtaactatcttacgagttttttgtttgtttgttttaaatttcagattcaggagatacatgtgtagttatattacataggtatattgggtgatgatgggatttgagcctcggtgaactcatcacctaaactgtgagtgtagtacccggtaaatagttttgcaagccttgcttctctccccgcctcccacttttggagtcgccagtgtccatcgtttccatctttatgaccatgtgtgcccattgtttagcttccacttatgaatgagaatacgtggtgttcacctttctgtgtcagttatttcacttagggtgttggcttccagttccatctatgtggctgcaaaggacatgatttcattatgaggttaagtttaagattaagccttagaattcacattaaggttttgtgctcggcaagaataaggtcccaggaaatgttaattgtggttgccgttgtcggccaccatcaccaccaccaccaccattgtcaaattaggctcttcattcttttaataactgcttctgaggttttattttgttttgttttgtttttcttcgagacaggcccttgctctgtcaccgaggctggagtgcagtgatgcaatctctgcaacctctgtctcctgggctcccacctcagccgcctgagtagcttggactgcagatgtgcatcaccatgcctggctttttgtttgtttgcttatttaagatgggtcttggtctgtcacccaggctggagtgcagtgacgtgatcctagctcagtgcagcctccaacacccgggctcaaatgagcctcctgcctcagcctcccaaaagtgcttagattacaggtgtgagtcactgcacctggcctgaggatttaaaaacaagcgagcaaacaaaccaggctatcctagatatttgtgttatgaaatgagtttctgtaggtaatcagtttcacttatttttttatttctatgaatttatagagagcatggtatatacttggcacccagagatagttgtaagaaatacattgtttattttctgtgtgttagaatttgaggattctcaatacattattaaggcaacctccacctcccgggttcaagcagttcttctgccccagcctcctgagtagctgggattacaggcgtgcactaccacgcaagaattctgaagttccttgcgtctgaatgtgtgctatactgcttgacttaatttcttacaaaagattgtcaagagatacttcttttcaagggcacagtcgaatgatgaccgtccactatcaggcattttgttatcagcacttgtgggtagtgtcaacagggatctcttggctgctgggaacttgaggttgagatgacactgcagttgcatttctgtaacagcatccttttctttcatctagccctcacatatttattgagcatctgttccattctaggcaggacttgagagattgaagtaaatagagaacacttgtccttagggatctgttgtaaaatggggagatgaaaatgttggcggggtgctggtagctcatgcctataatctcagcactttgggaggccaaagtgggaggtctgcttgagcccaggagtttgagggcagcctgggcaacatagtgagaccttgtcttacttaaaaaaaaaaaaaaaaaaaaaaaaaaaaaaaatatatatatatatatatatatatatatatatatatataaaatacatacgtaaaatacatatataaaatataaaaatctaattatatacatgtatattatatataacatgtataatactatatatttgatatatattatatataataaaggaaaatgctagcaaaatgtttgcagctacaacagtggtgttccatgttctataaggtatgtaaagttttgtatcctttttttcttagtgtagctgcattccacatacttttaaagcaagaaaagtcccatatgtaggtgggaatattcaggctggataaattaggaggtgtgttcaggtcagcctccagatgggctagttctaactttctctccctccccaaagaggcagtcttgaatattctttctacctttagttaacacaactaattacttctcaaactgtcgctgtgaaggactagatttgctttttttttccctccaacctgtggcagaacaatacttttaaaatacaatgcaaataaattactgggataaagtggcttgtgttttatgggcctttattttagctattattagagttaacagatataaaattactcagtcaagttgctgtgttctcaaaagcttactctatttctgtacttcatggagactgggaccacactttgagtaatattgcatcgtataacactgttaaatacagctgtccttaaattttctgtgtttatattattcaccagctgtatatttctggtgtaggctgtttggttatgtagcttctttttttttttttattatactttaagttttagggtacatgtgcacattgtgcaggttagttacatatgtatacatgtgccatgctggtgtgctgcacccactaactcgtgatctagcattaggtatatctcccaatgctatccctcccccctccccccaccccaccacagtccccagagtgtgatattccccttcctgtgtccatgtgatctcattgttcaattcccacctatgagtgagaatatgtggtgtttggttttttgctcttgcgatagtttactgagaatgatgatttccaattggttatgtagcttctttaatgattggtatgtgttttaaaaaataattccatgcctcttgttaccttgaacgttttctttctttatctttccccctcccgcttctcattccccttcccctcccctcatttttttttttttagacggagtcttactccatcactcaggctgcagtgcagtggtgtgatattggttcactgcaacctccacctcctgggttcaagtgatctcctgcctcatcctccagagtagctaggattacaggctcccaccaccatacctggctaatttttttattttttagtagagatggggtttcaccatgtgttccaggctggtctcgaactcctgacctcaagtgatcagcccgcctcggcctcccaaagtgctgggattacaggcatgagctgccacactggcctgaatgtactgtatctttcaatccttgggttaggcttgtaggtgtcctaaagcattgggttttgtggggctctagtgttaatagtattataagtataattgtattgcaggtattcatagtattcagtactttctctagagacctatttctccattttctcatgttttattttctttaaaatttttatttttatttttatatatttagatagtacaagtgcaggttcttacatgctcatattgggtagtggtggagtctgggcttttagtgcatccatcacctaaatagtgaacattgtacacagaaggtaattttctgtcctcacaccttgcaccctcccacctcttggagtctccagtgtctgttattctgctctgtgtgtctgtatgtacccactgtttggcttccacttgtaagtgaaacatgcggtgtctgatttggtgatttcacataggataatggcctccagttccatccctgttcctgcacagacgacttgtcttattttcgtgacctgttctcgagctcaacttcagttcagtgagacctgagataaaatgaaggaaagatgttcctgttgccttttgaaagggtataaaaacaccctccctcctctttctgtgacatgggaggtggcgttccagactcctaattcgtaatgcttgtgactattttgttttgtgtttctctgagtaaaatatgtgtatttgagcatccgatcactccatttctcattcactggaagaagagagttttcaaagagcttaacaaaatagtcacactccgagggctcctggtttgaagtaggagtggtgatttgatcctatcctatagccctctgtctattttggcaaggaatgcgttgagagacttctttgaacctgatgtgtgctctcacaccctgctgactccagggtgttttgctacaccctgttttactcttgacaaactacctccggcctgtttgactggtgcagttttaatttggtgcagttgaggcgtagctggtttccctggtgaacctggagtccacactgccggatgccgtctgtgccgtccattgaggggttacttaggtggtggaatgtgttcccctattttccacctgctttccattttttaccctttacttgaggttttgccctttccttgaggactgagcaaaacaggttgtttatttacattttgggtggactgtttatttggggatcattttattctgttgttagtcttgaagtctgtgctgttgaggattttgtcttcctaatgggttgagatggcagacagagcgaaggggaaacctgcaaagaggtattactctttttctgggacctctcggaaggattcggtgaaggcgttaaggttttcaaggtcattgaacctcaagagagccacttcagaagtcagcaaaaggcaggttggtacagaaacttccttaaaacacccctttaatttttattttcttggtgggcggggggaattgaaagtcatgcttactctttgtgtttactccttaatattattttgaaaaagtttcctgattaatttttgaacatttttgttttcaaaatcatactgatattttctgtgctatcaattcatttgtgaatgcttattatttattagtgtttatgtttattcacttattgcaagggtttaaattactgtatgctgcaatactaacaagttgtgatattagcagatccttattactcgtatggaatctcttactaaaacatgtttttaatggagaccctgatgttacccaaacatctcactaaaaaggattagttgatttttatgtataacaaaataatggaataaaagcaaattagtgtttctccaatttcacagttctgtacattgttcagaattaaaaatatttttttctgaaaaatactttgggccaggcacagtggtatatgcttgtaatcccagcactttgaatggccaaaggaggtggatcacttgaacctagaagtttgagaccagcctgggcaacatggtgaaaccccgtctctacaaaaaatacaaaaatagccaggcatggtggtgcacacctataggcccagccactctggaggccgaggtgggagaatcacctgagcctggggaggttgaggctgcagtgagccgagattgcaccactgcattccagccttggtgactgagtgagaccctgtctcaataaataaataaattaaataaataaataaataaattaaaaaaacattttttaaaaagaattctttgaagctactggatatatgactgtaagtttaggctatacaatcaatatatagtggatcttttaacagtgttataaagattccttttcttaatgttgatatttttggagctagtttgtaattaccaaacagcaataacagataaaaagtaaagattaccctgcacataaaatgtgctttttttatttttacttttggatgagtgccatgggttatgtgtgccctccggtggtctttcattagaacggtgattttcgagctgtgaaaccattgagagttagtcatggtatctgtgtccccctgcccggagaagagtggtgccttgcagcattacagataggtgcttcagaactgtttccctcttcatacaaattcagctcaaatgtgtgatactgattctggccagtttatgaatgatgtgtgttttgggaatatctcttaatggtttatagaatggacacttaatatgtcatcaattctacacttattttggtcctcatatgtctgctaaatcttgcagttttagtttcttttcttttttttttttttgagacagagtctagatctgttgcccaggctggagtgcagtggcatgatcacagctcttggtagtctcaatctcctgggctgaagcagtcctcccacctcagcctctcaagtagctgagaccacaggcatgtgctactacaccctgttaattttatttttttgtagatgtgggggtctcactatgttgcccaggctggttgcaaactcatggcctcaagcagtcctcctgcctcagcctcccaaagttctgggattataggtgtgagtcactgtgcctggccagtttaatcatctttcttatattttccttattggacaacactgaaatactgaaaataaatcaagtccaagacattccaaatctctattttatatgtaacatacttccttccgcagaaactgccaccatattggatgtttgttggtaaagaattttcagcaaacctgattttcttcgatgtgatattttcttcaaattaatgtaatttgagtaaagacacagaataaaacctgtttttaagacattaaactttctgtgtagactatgcagaaagtaataccagaaatgaatgaggaaattcagagactgcctaaaagtattgttgctgattctgttggcagaatcttttctcttccctttcgaaaaatcatagtttaaaactgcttgaacctgagggtggtggcctaagtgttggtatttgccagttgagaatttaagaatgagtgccttgtattgtcattaagaattccataatattgtttatagaagtagggtgttgacctagagatctctgccaaaacctaatttgtctaattaaattccgccgagcatttctaacttccttccctaaacgacttctaattgcgtgtcgttccagtggtagtgatgataatgatgatgttctgcccttgtaaacatgcctttaaattattaagttctaagctggcaggtaaaatggaattacttttcatcttaaagatgagatgtggccttttgggggatgtgtgtggatggggacattgcgggtagacgaagaatcaggtagacttcttgtacaaaattcctggatcatttgtttattgtgggaaggagcactgctaagaaagacagactttttccccctcaagcaggaaccatcctctcttcagagcgttttgtttccctgctaggagccaggatgtgacatttaagcagccatataaatttcagttttgtgcatcactttgaggtaaggtttccgtagaaaacataagttttaaaattgttttgtgtgcgcttctttggggagggagatgtagttggaataagagtataatacctctgagatttgtcaagagaattgagaccatgctttttccctgctgctgttgagttatggaggcggaggcttgggtgcgttcaagatggggcatcactcgttacctgtggcctgccttggtggctgaggagggcattgctgctggcggtgtgatggttgttaacactgctttacaagcggtgctgaagaccactctcgtccatgatggcccagcacatgagattcgcggagccgccagagccttagacaagtaccaagcccatctttgtgtgcctgtatccaactgtgatgagcgcgtgtgtgtgtgtgtgaagttggtggaggcccatgtgctgaacaccagattagcctaattaaggttgatgaaaacaagaaactagggaatgggtgggcctctgtaatactgacagagggaagaccctgtagaaaggttggttgaagttgtgtaatagttaaggactatggaagttataaggaatctcaggccaaggatgtcattgaagagcactttaaatgcaagaaatgaactaataaaactttggttcacattcctcaaaaaaaaaaaaaaagttggggtattgtattaaatggaataaaaaagagaagctgaaatatcatattggggagttttctgagctcactgggtgagaggttcagtttatagcatagatgattgaaatttctgcctcagcaaaagcagaacatggtttttgaagtaaatggttgaaattcatgcatccagatgtctgtatgactgggttcatggacttcaatcatcttctttgacacctaggttattattatctatatatctgaatctgtatactgacttctaggttttgattatggagaaaataacaaccaagatgtagaagtccatcagaatgatacaatctgacaaagttgcttaacagcagaaaaacaatgatgctaactcagaaagttagatgattttacaaaattcaacaaaaaagctttaaaagctgtaaattagagatataaattataggttacctgttaaaaaagacttccttttcaaggaagtattaatagaagacacaactcaaaataatactgccttgatcttgtaaggccttgaggtaattgtgaatccccttgatagaaaaggtaagaagcaaagcaaattgggtggattttatatttaagcaatctagagatttataatatctattacgtgcatatacatgtgtgaagacaacatagtaaggtgtgttgttttatagttttctgtgtcctacttaaattggcttgcagtagaattatagttaaattgatgcagggcaggtaagccccaaaattgggcttagaccgggaaggttcttggctttgctcaggaaagaattcaagagtgagggctgggcacggtggctcacgcctgtaatcccagcactttgggaggccgagacaggtggatcaccttaggtcaggagttcgagaccagcctggccaacgtggtgaaaccctgtctctactaaaaatacgaaaattagctgggcatggtggcaggcgtctgtaatcccagctacttgggagcctgaggcaggagaatcgcttgaacccgggagacggaggttgcagtgagccgagattgtgccactgcactccagcctgggcaacagagagaaactttgcctcaaaaaaaaaaaaaaaaaaaaaaaaaatcaagagcgtgcaggtggtagaagaaaacagctgtattgaggctgtagtgttacagctctgtggctgctcccgcagagcagggctacccgctaggcagtgagcgcagggtggcagctcaggggcagttctacagtcatgtttatacccacttttaattaatgcaaattaaggggcaggttattctgatctttctagaaaaaggtggtaactttcaggtgttgctgtggcagtgttaaactgtcgagctggtggggatgtcttgtggagaggtgctttttatacagtcgttctttgtacaatagacagtgctacttcttgttaacgaagaaatacagatataaccaggataattttgagtacagaactgttcatcaaaaaatattaaaacatacctatgttctggctaagtgctgtgttagaaaactacttgctaagaatatgtaacaagttgggaattagaactctcctcctgtttgtttgtttttttttttttgatgcagactctcgctctgtcttccatgctggagtgcagtggcacgatcttggctcactgcagcctctccctcccgggttcaagtgagtcttcagcctcccacatagctgggatcacaggcatgcttcactatgcctggctaatttttgtatttttagtagagatggggtttcaccatgttgcccagactggtctcaatttcctgtctgtctgtctgtctcgatatcttttcttctctgtctcttgtttgtagtagagagaataactttgattcctaaatagaaaacagaatatatatgtgtggatacttgtattgtgttgattgtcttcattactagtttcctaatcgtagcagaaaaggtggtgttggctactaatgtcaccccagccctaaaggagtaatgtgttcttgataagtttgtgacattgctttcctgtgtaaatatgaaaatattctggaacttgatttcttgttactcttgtgttgtgcaaattgtgtgttctggcttcctttaccaaccacaagtaatgagaggttccaaaacttaaatacaattcatattttcgaggatagcttataatttttgaaataattaagtttagctttatgtaactaggtaaaaatgtgcatatcacagtactcaagatattagtttaaaatgaaaaacaaaaaacaccttaagtttttgctatctttagtttaatctgtggcaaataagctttctcccaaaatcatgctctccctagatagagagattcctgatttggattgaagcaggttctccttagttatttttaaggaaatatcatgcagtgtgttgagcattaattcttccggtgcttcccggatctccatgaagattttttttttccagaaatggaagccaagtttaaactatgctgagataaggttggatttaagaatagaatcgtttagatcactgaagccctagatgttcaagagaaatgaagtacatataggtcagagagaggatggaatttatcatcctagaggtattaacaacaaaaaagactgctgaatacagttcaatcaagaaagaatcaagcaagacaaggtctttaagttttacccgtattccacatcccttactccagatagaatttttgccacttcatactactaagtaaagcaggcaacagatgtcaaagtacaggaggatcaacatggaaccattgcttattttgaagaaaaaaatgtagatcatatagttagaggattaatacatatttcctgaaaggcaacagttcttctacaaggagcatactggttatgtgtttttagaaatagggcctcgctctgttgcccaggccagagctcagtagtgtgatcatagctcactggaacctcgaactcctgacctcgagcagtcctcctgccttggcctctcaaagtgctgggattacaggcatgagccaatgcactgggccgttcatgtgtttattaatacaaagtggatataatgcagttaaagttaggaaacacggtacatattgagaactgttagttacatgattacatgatcacagcgaggagctgtttctgtaagatcagaatgaatggagcatgctgcctgggaacctgtagctgcttggttagaatgagtgggtgctcagctggtggtaaattttttgtttacctttttgggttgtgaaccagctgcactgtaatttatgttaatttgtgctttaaaagttttcagggttgtactcgatcttaattgtgggtgagaaagatgaaaattatgcataaatactaatggcagtcgtgaaagggagagaggttattcttttttgaaaaaacagaatcctcctctgtcacccaggctggagtgtagtagcgtcatcatggctcactgcagcctcgaactcctgggctcgggtgatccttctgcctcagtctcccagtagctgacaggcatgcaccatcatacctggctaatttttcactttttgtacagatggggtctccctatgttgcccaggctgatcttgaatgcctgtcctccagcaatcctcacaccttggcctccaaggttatccttttgaataaaaatcatatgtaactaaacccagttttttgtgatatgtaaatctagagttatatctttaaaactgtaaagcatgtttttgtaattcatgacctacttcttttttaccttaggagtgctacttctgaattcttgcagaagtacagattgtacagttaatgctgatctttgcgatagatagaacaacttacattaactgtgaaaagaattctccctgatgtggaaatacatataatcttattttggcaagcattttacccctttcagtttctgcttttcttgatgtttaaatttatcttgtagccttgtatggtgatagcaactccttggtatttttcttgattttaattttcttctgcagtttgaaagattgtattcattgctgtgatgcatataagatttcttagtttttttaccactatgttttaatatgaaatgccaaagaattttaaagtttttttaaaattaagatttcaacgttgtggcctagatgaatgtgttacttgaggaaggaggttttaaatgcatcctatttaatgggaaagtttgacttgcgtgcatcactttatttttccctaccaaaatcaacattttatatcgttagaatatctatcgatatatttgggttacctgactcaaacctgtttcttaaaagcagaaagcagttaactatttctttataatgcttctccacttccattggaaccatgacattgcaacagaaattatattcacaggcaaagtcccacagcaactgtcttatgctgtgtgttgcagcctaaacgcttatttcttttgatttgaaggctgtaattcttactgcgagtctcagtaacttttgcaagagcagccattgacaggtgcccgccatctctctagccagatgctacctcatctgcctctgtccgatgactctggagttggtctggtctcaatttagtaaaacttgatggccgccgatgtgttgctgaagtaatcagttgtaaaatgaggaggtagaaatgtattcttgtcttttctgggaggttcaggtacacacaacttcaggttgatgatgatccaagttccttccctgtttgtgtcttaaaaacaagattgaaagcataaacaaaaccaacaacaaagttctttgatcaagggaagggattgcaactgttcacggatggaattggattggaccctgaattcttacagcttgatttgactttgtcatttagtgtaggatttcttaaccatggtttcactaggtgcttatagatactctaaaacatgcacacactcatacatcccaccccatagatgcccagaaaccactcaggactcgctgaatcagaatctccagtggtagtgggatggggttggggctagtcaggtaccctcacttcctcccgcaaaggtcccaaagtgaatccagcctaaacattgccaggtgaagaaactgaagtctagagcaccaggcgatatgaagataatagaactgtttagtgacagatttgagaaagaagccagtggcatttgagcatatgccctgtgctcaccccagtaagaaatcagaagcatagtggtgcagatcacctgcctgagagccagcggcggcctggcgagccggtgtgcacgcgctggctggtattggtgtcagctttcgtgaaggcgtcccttgtgttttgaggcttctcaagttctgaggaagcacctgcagctgcacagaggtgcgtgtgcatggagttgggaggctagccgccaaatgctgctcagattcccaggccagagagatggtctttatacgtgataagagcacggataagccacctgctttggggtcaaaattaaaaagtcaatatacaagtctttaacctggttactaataaagaatctctcagccctgctaacataacctgtgactttgttcgtgttagccattttctggttatctaactttgaatgaccttttcactataaatcttttagacacataggtgtagctttgtcaaagagtactatatttttattcttcctagtagaattttacttttatcataggattgaaagccaaattttaaatacatccttttggaatatgtttttgtacctatgttagaggaccatgtgaggtgtcagataccttaaatttttttttaaatcacattttaatgcagatactcagaacatcaagtcattaaattatgtgaaaatcagtattttgtgagaagggtccagttccttttcatttgttgcaagcaaattatcacctgcttctctcttacggtgcataattttgttagtaggtaaggtaattttttctgtttttttttaatgtttttaaaattgtgtaaacgtaaggaatacaagtgcagtttcgttacatggatatattgtgtggtggtgaattcttggcttttaaccatcattcaatatgttgctgtacccattaagtactttcccatccttcaccccctcccatcctcctgagtctccaccgtctatcattccacactctgtgtccgtgtgtatacattatttagctcccatttataagtgagaacgtgtggtatttgactttctgagttgtttcactttggataatggcctccagttccatcaatattgctgcaagacatgatttcattcttttttatggctgaatagtattctattgtgtctgtataccacattttcttttatctagtcatctgttgttggacacttaggttgattccctatctttgctattgtgactagtgctgagatacatatatgagtgcaggtatctttttgatataatgacttcttttcctttgggtagatacctagtagtgggattgctggatcaaatggtagttgtaattttagttctttgggaaatctccatgctgtttttcatagagtttgtactaatttacattcccacctgttttaatctgttctgttcactgctgtatccccatgtcctagaacaatgctcataagcattcagtaaacatttgttgaatgaatgaatgaatggaatggaaatgaattaatacccaatctatctttgctttgagaaggtcctattatgcaaataagtttctcttaaaaaaaaaaatcaaacttttaaaaatttttagtagagacggggttttgctatgttgcccagcctggtcttgaactcctgggctcaagcgatcttcccactgcagcatccaaaagtactgtgattataggcatgagccactgtgcctggccaagtttttcttcttttgcttatcaatgaaaattaaatatgtaccataagatatatctttgaagataaaaggctttggagtgttttcttcttcctgtgtttgaatatatatattgtgggagtcagaataatgctatagagccaggtttggaggaggagagacgtctgtttttcatcttcctctctctgctcttcctggattttgaactctcttgaagctactcacatggatgtgaactgtgatagatgactgactcctagttcaaaactttgatatgatgcagtgactatgattcagttgcactgagcaggttatatcaggtagagagcacccacaaaatctcatgatagacaatactataatgaaaagagaagggttctccagaggaaggtatttttatgctagtaaccacagaacttttttgataaggccaagaaatttactgagcttttttgataaggtcaagacatttgccagaaaagaggcttgtctcggcacatagtcctggagtcttgatggttttcatttgtagttgttgcagatgaggaattatttgttgcttagctgtttttttcttgcatttacgaacccgtggtagttactgtcttgcttatttttccaccttgaccatttcaggccgcttgaggacaatccgtatccatcctcactccatgcaggaagttaaaggctgagcaggagacatgcaccattagtgtactgcacctcctcttcccctagtttaagaacatcccttcttctcattcccctttatgtaactttggaacattaaagcagcagatggtttctccttcaggctgcacggaggagaatggagcttagcatgatgtgttatccttaataatgtcatcacaatattatttgtttcttgtggaatttaaaaataaacattagcctcagtggctgatatttatattctgcttaatttgccatgcctattcaagctggctgtcaattttggggctggtcttactggcctggactagaaagatgagtttgtccgatatcacccctatgtgaatgccttaatgcttagaatcatctagcaaatacttttccaatatggctagaaacaaaatcatcttaaatcattaggcatttttcagtgccaaaggctatcaaatatcttttttccccattgtgtttttatggttcagtgatgaataggtgacaattttgtagccttaaattcctgcactatcagtaacaccgtggtaaatgccactgcagagaaaggcaccattgatctccccaccactgcctctgggatgctttagacattgacagatgtgctttgtgaaaccttgtggaatgacacttggggtttggtctgttctttctttagaaatgaaacttttatttttgacctattggcatttctttagcagaaagatcactcctactagctatctagatttgctgcagatgatttgttcattttaatgtttggattttgttcttggattttctaacctatttctcaacttatgtatcaataatcttgttatacactacctgttctatgttggccaggctggagtgcagtggtgtcatctcagctcactgcaacctccgcctcccgtgttcaagcgattctcctgtctcagcctactgagtagctgggattataggcatgcgccaccacgtcggctaatttttgtatttctagtagagacagggtttcaccacgttggccaggctgataccaaacttctggcctcaggtgatccacccgccctggtctcccaaagtgctgggattacaaggcatgactcactgtgcccagccaagtttagaatatatctgaaatattctaaaaggtctgaaatgtatgtttgtgtgtgtgtgtgtgtgtgtatatatatatatatatatattttttttttttttttttttagggggaggggtaggtgaggtggaaggttctgtatgcaaatcaaggtctggtttccaaattaggtcctccaaacaaggtcagattgaaaactgaaggcttcaggttttggaactgtcaatcccatgttaggtgtgcctgccctgtccctctcttcctgcctggagggctgagggtgaggcgaaggagtccagaagcagaagtacaacacatgaggaatccttttgtggactcctggacgttagtaagggtggacctaagtatctggcaatgtgctcggggttttcttgagcaattcctcgagtgccacctagagtctagtggtaatactgaattaacttctaagctttgtcaaggagcatggagaacttgagattctcagacatttttattctgtatcatgaagaaactcaatagtaattggaatcaggatcagtttctggctgcttgatcagccatgtaattagtcagcatggtatgaatatgtacatgccggagttcagtaatataccttctatacttaaatggggatttttctttgagaattggcttttttttttttgataagatcttgctctgtcatccaggctagagtgcactggtgtaatcctggcttactgcagcttcctgggctcagccatcctcccgcatcagccttcagccttccaagtagctgggactacaggcatatgccaccatgcctggctaatttaatttaattttttttttggtagagtcagggtctcacttggttgtcaagctgatctcaaactcctggcttcaagtaagccccttgccttggcctcccgtggtgctagaattataggtgtgaacgcctggcctagaatctaatcttttcttttcttttctttttgttctgttctgttctgttctgttctgttctgttctgttctgttctgttctgttctgttctgttctttaattgagacgaagtctcaaaaagcccaggctggagtgcagtggcgccgtcttggctcactgcaacctccgcctcctgggttcaagtgattcttctgcttcagcctcctgagtagctggaactataggcacgtgccaccatgccaggctaatttctgtatttttagtagaggtggggtttcaccatattggccaggctggtctggaacccctgacctcgtgatccgcctgcctcgccatcccaaagtgttgggattacaggtgtgagcaccgtgccaggcccagaatttcttttttttaaaaatttttaaaatttttttgtgatgtagttttgctcttgttgcccaggctggagtgcaacggcacaatctcagctcactgcaacctctacctcccaggttcaagtgattctcctacctcagcctcctgaggagctgggattacaggcatgtgccaccacgcctggctatttttttttgtttgtttttttcagcagatacagggcttctccatgttggtcaggctggtctcgaactcccgacctcaggtgatccacctgcctcggcctcccaaagtgctgggattacaggcatgaggtgcgcccagccttagaatttcttttttagtatgattatcccctagcttatttgaattactattttaataaacacgttctggaaatcttaattattaataactttgattgtattaggcatgaaaagttaggcagattttttttattttaaaaaaaactttgtaattgtggttttacttatattgcctctattcagtaggatccccctccctctccccctctctttccctccctgtctctgtctctccctctctcttcacacacaccacacacatgcacaccaggaagcagttctgtactgtctacaaattctctgtaagccatcatagaagagaagtgaatcagagaaggggattcaacattctacatgctaagacctgtccggcacacacctcttcacagccttgtctgaagtgacagactgtagcaattgctaatttgactaagaaaaaggtttctgggccaggcatggtggctcaggtctgtaatctcagcactttgggaggccaaagtgggcagattacctaaggtcaggagttcgagaccagcctggccaacatggtgaaaccctgtctctactaaaaatacaaaaattagctgggtgtggtggcacatgcctgtaatcccagctacccaggaggctgaggcaggagaatctctggaacccgggaggcagaggctgctgtgagctgagataccaccgcactccagcccgggcaacacagggagacaccttctcaaaaaaggccaggtgcagtggcttacgcctataatcccagcactttgggaggctgaggtgggcggatcacaaggtcaggattttgagaccagcctgaccaacatggtgaaaccccacctctactaaaaatacaaaaatgagccgggcctgggggtgcacacctgtaatcccagctacttggtaggctgaggcaggagaatcgcttgaacctgggaggtggaggttgcagtgagccgagatcacgctactgcactccagcctgggcaacagttcgagactctgtctcaaaagaaaaaagaaaaaggttttcgattgcctttgctattgattcagacagtgacataaccaaatatattaaaaagaactcccacctctggtctctttggtctcggcggcagaagcgagatgaggaagggagtgtcatccttagggaaacatcgcagctggacacactccctgtgctgctgcggccctgaggccccaacctgctaagccaagagaaggcagaactggagtgccaaggcgaaaagacgaagcaacaccagggctggttgaatgaggcgcctaaacattgtacactacagattcaggcctgggctccgtgaaggacagcacccagacccaagggccagctactgcacctcatcttcagaatttcagtgattggtcatggaatacatgttctgtttttttttttcttttaaagaattctttgggaataacaaaaactgagggggaaatgaaaagttttgtggatgaatagaagaatgacacagcttctttaaaatgtttgacacttctggaacctctgaagcataaacagggtgccaccccactgtgttcagtgggcctgtcagctccatcttcgtctaaaatcagatgcttggaagtagagaaggaactttttttaaaaattttttatttttgtggatacgtattaggtgtgtatatttatggggcataagaaatatttcggtacaggcatgtgatgactaataaccacatgagattaagtgggatatctaccccaagcatttatccttcgtgttacaaagctctgttgcccaggctggagtgcaatggtgcgatctcctctcactgcaatctccgcctcccgagttcaagcaattctcctgcctcagcctcccgagtagctaagattacaggcatgcactactacgcctggctattttttttgtatttttagtagagatggggctttgccatgttgcccgggctggtcttgaactcctgagctcaggcaatctacccgccctggccctcccaaagtgctaggattacaggcatgagcctctgcacctggcctcttttagttattttaaatgtacaatgaaattattgttgcctatagtcaccctgctctgctaggaaatattagttcttattcattctttctaactgtatttttgtactcattaactccactcccctgctcccagccccacacccttcccagcctctggtaaccatcatctactctctatttccatgatttcagttgttttaatttttagctcccacaaatgagtgagaacatgcaatgtttgtctttctgtgcctggcttgtttcacttaagatgatgatcttcagtttgattctttttttttttttttctgagacagtttctcactgtcacccaggctggagtgcagtggcactatctcacctcactgcaacattggtctcccaggttcaagggattctcttgccccagcctcccgagtagctggaattacaggcatctaataccacgctgggctaatttttgtatttttagtagagatggggtttcaccatgttggccaggctggtctcaaactcctggttcaagtgatcctctcacctctgcctcccaaagtgctgggattacaggtgcgagccatcgcacctggctgatctcattcttttttatggctgaatagtactccattgtgtgtatgtaccagattttctttattcattcatctgttgatggaaacttagtttgcttccaaatcttggctattgtgaatagtgctgcaatgaacataggagtgcagatacctctttgatgtactgatttcctttctttaggttatatacccagcagtgtgattgctggatcatgtgatagctctatttttagtttttaaggaacctccaaatggttttctattgtggttgtactaatttacattcctaccaacagtgtatgaggttttctttttctccacatccttgccagcctttgttattacctgtcttttgggtaaaagccattttaactgtggtgagatgatatctcattgtagttttgatttgcatttttctgatgatgggtgatgttggggaaagggaacattttgagaatgaggaatactgatgaaagggccagaagttcattttaggcactccgagatgtcagccgagcagttgtcttaagtagctccctgcccagtagtagccttcacggttaggcctgcaggtcaaaggagcagaatttaaccatctccccagggtgcttacatgcaggatctggctgcaggaccttctttccagtggggctttcaaggtagaaatctgcctctttcttggactgctgcactactccatgattgggaacctttatctaacattgattggataaaatgccccaccttccacactgaagggcttgtctcaaagtcagagcctcttatctcatttactgtctgggcggtccctcctttgacagctgttttgcccaacatttgataacaattctgatctttgtgattctttaattatagaccattgaatctggatgaaggccagatgatggatggaccatagccaggcccaatttttgctgcagatgaataaataggtcatgttcattcttgcttcttccccctttattctatgcaataaaacatccggctctactaatagctctaacttgctttttctaacctccgtagaaaatagatttgcccgtttttcccctcccaggttgctttgtattgattaacccatcaggccatcagagtggtggttagccaattcatgttctttcatcaaatttggggaaaaggaccctaatcaggcatgatcaatacaaaagtttgacatttgcactgtataaatgtcccgaggtactttatttgtacatttcttttagcatttttgaaactctgtattgtttcataataaactgttcctttattaattatagatgagttagctttgtcagcacattgggtacaagaaatgcatcgttttgttccttgtttctcaagtagagtgattatagcttcaattaaaaatgacttttttaaaaaactgagattcccatgatgctctgaagggctatgttatgtcaaaagctgaaaaccgctctgttacacagaatcctcaaactatctccaccagtcccattagtcataatctgagtgtttctgccccatgtaaaaagtgaatttaatgtgcaaaagaaaagaatgttgtcaattctatttttaaaaaagtaacatttatttacattactatttcattatgtcagtagattcagcttctcagtggtagtattgagtattagggataaattggcacacaaccaaaaaaaatttaaaaaattataatgaaacacaatatttctgtgtgatgttttaaaataattttccagtctggaaacagccaagcatagcttctgttttgtgccttagttccttgcattcttgctgtgcaggaattgctatcctatttggtactgatggaatctggtgttggcaacttcagccaaaaggatgcctagtggttgctgaacttacactttctaaccctgagaattgtccattcacacatgcgttggtgtgcattcaggtcagtgagcggatgacagatacactttattctgaaatgcatggctatttgcccggttttgctgtgcatttcagcatccgtgtgatgagggctgctgtgtacatggccatgccctccgaggctcccttaaacccaggtgtgtagtgcagccccgtgcacagtgacatacatctgtgtaagctcctttgaaaatacccctgtgttaaagatgttctttatgtactaaaattttattctaacttttaaattgcccctttttagagaaaaataagcatagataatgtaagtatttatctagatattatttgttgttacctaaacttctgtcctgagataagctttaattaaaatcaaggaaatgtttagaaattgtagtttcaaattataaaattatcttctcccaataattggagttgggagagaaatacacacaatggagggagaggcaggggaaaaattgcatgtaatatgtagctatgtttggctagtattttaggttacagtttacattgtgttttcttagagttattgatgttatgggttatttcaacaatagaggggaagatttggggaaaacatatgcattttaaattaatatgttttctgccttccacaaagttaaataaattctgagagatttctgagtactttttggtaaattcattttatgaaaatgaagatgctaattctagtttgtggctaatgtaaataacctttgaatggattatttctagggaagaaaatgcatgcgcggaagcaaaaagtacctaccattgaaggcccttgggtttgtgttttataacctagatggcctggcttagtaaaacaggttctaactaggtacctaacttgcactacaggaagaagagaagtaaggctttactgagtcaggtggtatgaattagaaattaatagtattatcctgagtggagcttggtggctttttcagtggagtcattttcaccatccttttacattaaaaatgtaaattgattcacagtggggggaaaataaaaagtgatctagatgtgtaccttaaggaaaagaattcatacacctttattcatgtatgctattatgtcttcatttacatgttattatgtatcatctagcattatcctatgaaccattaagaaatggcctctgggtgctacaatgtgagtggcacttcctttaaaataccccagccaaaaataaaaaaagtgaagcaatgaaacagttttggcgaagattaataattactacagctgagtgagtgatacataggagttcaataaattatcctctctacttttttgcaagtgtggcaaattagatcattaaaaaaactaaaaagtttttgtaattaacatttttaaatgttgggaacaaaacccttagaaataattttattcttgctctgttatttagtggaggaaactcagggcagatgacatgtgttggtttgtcctgtgtgtcaaggctccttggaggcagagcctcttgggaggtgcaggtttcctggttcctcactttgtgctgggtgtgcctttcaggatctgattcctgagggtgtgtaccaagccagtactgtgtgtgcgcttgcattgccttactcttcactaagaacatggaatttgtaggtaaattctaagcagtgaaattgtagaaactaaaacactttgaaaataatatatataaatttagcatgtcttctgtgacatgcacaattataaatgctgtacttattttaacacacgtggtgaactctgtgaatgggctctggtgttttgtccattttataggtgaggaaattgaggctcagaatgcaccaggattaagttgttatttctcagctgcagttcagccatttgtgctctgcttttcgaggagacgtctcctttgctagctgctccctggagctttagagggagctggagcctggcaggcaggaggggggacatggcccttgtttgcttcctgttcctgtctgcattgcccagcaatagtcattaattggcagttccttctcgtttttagattttttccccctgtccacatctttaggcccccttaacagaatcagcaccgaggtccttctgctaagctcctcatgcctcagcctcagcctcagccccagcccccagcatcttctcctcggagggtgggtaccgtctgcccctggtgccgccttcaagcttcaggttctcataaccgaatttcctcagttccgcgggtggtaggtgtgctgcagttacctgtttaccctcttccttatattaaggatttgttttgtgatttgttttccttactcgatcctgaccttatttttggcatttattaaatgatattcagaattcagcaaattgaatttattctaaggaatattgtaatttaaaatagtatctagttattagtactagtacttatttttacatctttaccaaaaggtataaaacacatttttaaaaaaacatttgaataaatccacttatgttgtggattcttttttttttttttgagacggagtcttgatctgtcgcccaggctggagtgcagtggcgcaatctcggctcactggaagctccgcctcccaggttcaggccattctcctgcctcagcctcccaagtagctgggactacaggtgcctgcaaccacgcccggctaattttttgtattttcagtagagacagggtttcactgtgttagctaggacagtctcgatctcctgacctcgtgatccgcccacctcggcctcccaaagtgctgggattataggcgtgagccaccgcgcctggctgttgatctcttaaaaagctgagaagtggctaggtgtggtggctcgtgcctgtaatcccagcactttgggaggcccaggcaggcggatcacctgaggtcaggaatttgagaccagcttggccaacatggcgaaaccacgtctctactaaaaatacaaaaattagccaggcgtggtggcgtgtgcctgtaatcccagctactcgggaggctgagacaggagaatcacttgaacccaggaggcggaggttgcagtgagccaagatcgtgccactgtactccagtctgggcaacagaacaagactccgtctcaaaacaaacaaacaaacaaacaaacaaaacaaaactgagaagcagaaaggtgacagtgatgtgttaattactaaaatcatgtggctttggggaaggacacagatccaatgagaataaatggttatcaggtgattgtcaaatagatcgaagtagactttttttttggacaataattatttcatcaccagatgaatttcaggccaatacaaacatcattgtctcagttcctacctttctctcccatttcaccctgaaatttaaggaactatgaaatgtttgaaagtgtgcatgttctcgatctggcttttctgacttttttttttttggtagaggtgggatctcctctgttgcccaggctgatctcaaacttatggcctcaatcagccctcccagaggtgctggaattacggacatgagccatcgtgcccagctgtgatctggcttttcttatttatgcaattgccaaggctagaacagacctgggccttatttgataagtttagggtcaaagtttgcatcagatcgtaattctacacagagtaaaaagtagaaaatgtgacagcttgtctcttctctcccttaggcacagtgttgaatgtttattagaaggctgtttcctcacaacatgtttacatcaagatgcatgcatgccttagcttgatgcttttgcaatttttatgtagcatctgttcccaaatacaagagcgctaacaaggccttaatacagatagcagtgaggacagcagggagttgcccctgtcggtttctgacttctcctgcggccctgagttattattcataatgtaaattctctctcagttcccagcatgtacataattaatggaaaagactatccaaggaagttcagcagccacaagtaggtcaccattaccagatgtttaattattgtcattaggaagcttttggaaatacctgatgagctttctaaaagcataacaataagcaaatccttttggattttgatggattggttcttttgtattgaatgatgattaaggttattacaggcacagcactctcgccttcttccgaacatctttatcaaaagtaataattatgctaccctcgatatgaaatgcacgtcactctcctttcatatgttctctgatttcaactgtgccaagttttaattaatgtacttcaatagtacgaaaacttgagcatctataattacatctttagtagcaatatttaaaacctttactgacaatatatttatcatagaacacttcctggaattaaggtcagtttatgtggaactgacatgcatttcagataggtttttttttatcttgaaggttaaaagtagaatacaatataggagaagctaagagaagcccattaacattacaatttttgtggtttatggggggcagtggtgttaagtaagtttaacaaaggcagggaattttaaaaattactctttacttttttcttcaacatcaaatttgtataccataaaaaattttgacattttgctagtatgtgagtgagccattcccaagtcatccttttcaaatgttgtttgtttttgagttcacgttgaagaacacgattaaaaaaattcttttggttttttaattcagttcagaactgaatttaaaaatcagaaatctcagtgtctcctgctctttgctgctttccttcatggcatctgttgttactcttagacttcattcattcccattttgtggcttgtttgtggaatttaaagttcttaaaagcccaatttcctggtctccagttacttttaagatggacccattggctcccccttgtgtctactctttgtattgtcatcctccaggctcttggttaaacagcttgtaaggtaactttattactgctcttgaggaagggacaatggctatattcgtcagcgttctcatccccttatttactctcctctgcattctgccctcttctgcggggttggtagagaatagcttgggaagagccataaaatggaaggtcttgaaagccagacatcagagtggagttttggagtatgaatcgtgtgctggtaatttatgctcctccccattctgcacttttctccagggttggttgtgatgtcatgaacttctctccatctcacacacacccacagtcatgtatgatcaggagtaacacaggctagggcagtgcttattgtgtgttatacataaaacacacaaatcaatgtgaactaatattctagaacaatttatagacaaacaggtgcattgtgaaaaaagctaaatgggggccttagaagagaaactcatatatacctttatgttgcatacaattcgaactccactttgtaatgatttgatagggtgttaagtttatttttcctttgaacaaacctcgtcttcaaattgtaactataacacaggtaggattgcagagcaagtgtgttaaggcacataaaagtcacttgatactagataaagggagtagctgtttccttaacaggttcaaattgcaactattactgtaaaagttgttgacgtgctcagcaaatggtgggtggaaatgttggactcagaaaaaggatttgtcctgggcacgtccgttttcgtaacaagaatataaggtaatttttaagtgctaatttaatggttcttactgtaaggcaacgggagtgtagatggggaaagctggtaacaggtgtgtgcagtcacggagcgatggcaatgtcagaaaaggtgggggtcaaaattgttttggacattgatcggaattaaggaaagcatagatgtggaaaggtgcagtgtgtgtccatatcacggcagagtgtctgcgggagagtgacttgggaggagctgtaggatggaagatcttgaaagctccacattagaggtgaacttggagcatcttgtgattgcagggcaaatgggttgtgggaaatggagaagtaagaagtagattgtgattggtttttgtgttcaatgtgatataacttagcaatgcaggagtttttgtggaacctggaactctatttttgtttttcatctgttgaacttgtgccattctgtagagagttatagatatttttccatagaaaggcaggcagtgcagcttggattctagagcagagagtttggattctgttggcttgagttcgaagttcagccctgctgtttattggctgtgtgaccttgggcaagttacttaaccttttagcacgtctgtaaaatcatgataacaattgtaccgattgcatgggatgttgtgatggtgaaaacattgttatatgatatcaccttatacatgttagctattattcttgccatttttttgtatttgcaaattctttcccaggagccagtagtggaataatgtttacagtagttctttgaacttttttttttttttttacagttttactggcaccaaatgtgtttatctacacctagtccccattagaaccatgcaattacattcatgtttgtataaaggttgtcagtttaatattcaagcaattaataaagacaaggtgtgagtttttctgttaatgcacctctgtcttaatgtgaagcaacgtataagcatgcatcttaccataattggtgtgcatgtctgtgtacatgggcacaaacatttctctttcagccctgtaatcacatctccaagtaatctaagtcaaaaagagcaaaatctaagccagtggacatgctgaggctatctcagggtcttctggaatgatcaaggccagaaatcccatcttcatatacattttttttttttttttttggagtcgaggtcttgctatgttgcccaggctagagtgcggtggctattcacaggtgcgaacatagctcactgcatccttgagctcctgggctcaagtgatcctcctgcctcagcctcttgtgtagctgggaccacaggtgcaccaccacacctggcagtttcaaatgcatttttatataaaagtgtgatgttggtctgagtcttttcctctttaccttgcaaacctggattcatcatcatggttcatgtggtatctcgtgctatacatgctggttttgtgttccttgtgggagcatttttttcttttttcttcagagaagagaaagtttgtcaaaacaagggcaaaggtgaagatgtatggcttttcaagtgcttaaacgtgatgaacctgtttttgttgagggactgaggaaagagtattattggatgtgagggaagaagccagtgggattcttccttgctgtctaagagagcatgatgtgagtcaggggctctagaaggacatcacatgttgcacattttagtatcagaaacaggctgttttcctcaatgggttctactctcagatattatctttttttaatgttcgaacgtaatttgcttcccccctaaagaatacagtccttgtaacagcccaaaataccatttttctgattactatcacttatataagaccctccaaacctttctcatccttgaaagtgatccatgctaacacataacacactttgttctcttaagcatgtgtgtttttttgttgttgttgttgttttttgcgagtctgtgccccctcccttcctttagagctctaaggtttgtcattaaaatgagcacttccgtttaaatgtcctccgggctcatccatttgccttagctactcattgtttatttgaaatgcaaatttttatataacagccaaaatctaacccacttacgcactgttaactttatatgtaagctccttcttataactaaagaattcacatggtggttagttatggttgcagtctgccttgcactaacgtattttcattttctagaatgtatatgcatgcctgtcttttcctcatggagtcttctagggaaatcctcagcacactgcgagagggcagtcatttccttgttaggtgtgagtgagatgtgatccattccccaaacagcgtgcatttcagtaagggcattgtttttatgtgaggccgatccatccgtatctatgctattgtctgttacttgaagaatattgactgtcttggagtcgtatttctatcacatctctaccctgctggcttcaccatctaagtggtccttcagcaaacttctcaaactagacgcattccctgttttctgggttctggtggttagcttgggaagaaagtgaaatgtgacttgcctaagaaagtaagacccctctccccatcacacccatatgtgaaagcttcttgggccattattcttttcatctcagccaatagcctctgtccttgctccttgacatacttcttgatgactggtagtggaccagcaaagtagttaacctgtcccaaaatcacacacgaagagaggctagtgtttacagaatttcagccagcgagcctggtgcagtggcgtatgcttcttgtcccagctgcttagaaggctgaggtgggagaatcacttgagcccaggagttcagatgtagcacgggaagcatagtgagaccctgtctctaacaacagcaaattccagccagcttgcttgggagctcagtgagaacccggaggaaaaaatgctggccgtgtgggtcagatgctgcgactgacagtggggattgcttgttaagcaagaacagatactgtgcctgcttcttggaacttcttaggggccagtcattaagcaatgaagtgactgcactctgaagtataaaatttgccaggagggtgattgtatggtacaactggaataagggaatttcacttacagctttcttaggaaaaaataattgtgtcgaaatccaaagcatgagcagaagataagtggccaaattgtccactttgttctaccaaaaacagaaaattccttgttatccatgatgaaatgggtctaagtaactaatatgatacagtttttgcaaagctcgggtctcttaccagcatactgtattaacgtcgcttacaaaaaaacaaccagcatggcctggcctttgttgatctgtcagcagtgcttatggtttttgtcttcactgcaagcccctcttcagggactgcggttggctgtagaaaatgcagtccttggcttcattgtccacacttcctgcccagagcagtagtctctgtctaggggacacccacgtctggctggtgggcagggaaggggcttcaccaattcctggtgtaaatccgtttcccactttctcttctttatgtgcaggcttcttcctctgcacagagaaagcctgtgacatgccctttagtggggagtatcaaagggttgtgagtgctcagtatgtgagagaaagactagtcttaagaggacgtgtgtgtcattcttagaacaacaaaaagaagacatggaaagtatttgactaattgatttttgccatttggagcaaaaatctaatttttgtcaaagtgatgctgggaccatgtaattttgtgaaagtgaagctggaacacataattcctcacacactcagccttgtgcgggcggctgtgattccttcgccaccatgaagtgaagtgcatccaaagtgtgagccagtgtactgccttttttttttttttttttttttttttttttttttttttgagacagagtttcgttcttgttgcccagtctggagtgcaatggcacaatctcggctcaccacaacctctgcctcctgggttcaagcgattttcctgcctcagcctcccgagtagctgggattacaggcatatgccaccatgccaggctaattttgtatttttagtagggacgagatttctccatgttggtcaggctggtcttgaactcctgacctcaggtgatccggccacctcggcctcccaaagtgctgggattacaggcgtgagccgctgtgcccggctggactgtgtttctttttgcactttttggtttttcattttagtgttcttttgtgctttctgacctaagtgctggcaatgtgtaccttcatgtgtgaattgattatgaagacaatttctaagagcaatcctcaagactcagtttttgtctggctttctgtaatcattgaagcaacttaaaaaaaaatgtccacttcatctttagagttctccccctgcccaggcacacaggtctcactgcacaccctattcgtcaccccacaagatgcatgtgctgtctttggcttagcagttcacatgcaaatacaaatacagtcacgtgcagcataaaagcatttcagtcagtgatggaccacataaaccacaatggtcccgtcagattataatggaactgagaagttcctattgtctagtgacgtcgtagtgtcgacctgcagtgcagtccttaggtgtctttggtgatgctgctgtgaagaaacctactgtgctgtggttgtataaacgtctagcacatacagttgtgcacggtgcatggtgcttgatcatgacaatctttgactctgttactggcttatgtatttactgtactttttattgttattttagagagtcatccttctttaaaaaaaagcccgttgtaaaacagcttcaggcagggccttcaggaggtttccagaagatggcagctccatgtgtgctgtcacctctgaagcccttccagtgggacagaggtgctggtggaagacagtgatgttgatgatcctgaccctgtgtaggtctaggctaatgtgtgtgtgtgtgtgtcttagtttttcccaacaatgtttacaaagtaaaaaaccataatttaaaaatggaaaaaagtttataggataaggatagaaaggaaatatttttgtacagttgtccaatgtgtgtgtgtttaagccaagtgttattatgagtcaaaaagttgaaaaaattaaaagtatataaagtaaaaaagttacagtaatctaagtttaatttattgtggaagaaagaatctttagaaaatgtagtgtagcctaagcatgcagtgtttctaaagtttacagtggtgtacactcatgcctttggcctcgacactcactcaccactcactcactcacccagggcaacttccagtcccgcaagctccattcatggtgagtgccctgcatgggcataccatcattcaccctttataccatatgtttgactgtaccttgtctatgtttggatgcacaaatacttaccattgtgttccagttgcctacagtattcaagacaataacacgttgtacaggtttgtagcctaggagcaagaggctatgccatgtagcctaggtgtgtaggaggctctaccctctaggtctgtgtaagtgcactctagcctgatggcacaactatgaaatccctgaatcacacatttctgttttaccttaattaattatggagataaggccttgctgtgtttcccaggccgatctcaaactcctgagctcaaataatcctccttccttggctcccgaagtgctgagattacaggtgtgagtcctgtgcccaagccatgcgtctctcagaatgagtgtgcccctgttaagcgatgcatgtctctgtatgctcatgtcatgcctggcctttactggctacttgtacagtcatctgtcagctgtgacttttggggctataaatccatcaaagttcaggaatctcccaaacttggttcatttaatgcttagcagacgtagctccacagccatatttaaaactgatgatgatggtgtcccttgtttggaggattcatttgtaagtgaccataatgagtttatcctggccattccccagagaacagcaggactcctggttcatctaggatgtgtgaagtgactggccctctgagattgctgggcttccttaaaaatgtcacatacaaggacatagattttcacattgtgtagtattgtttatatcaggggtccccaacccgcagaccactgtgtggtactggtccatggcccattaggagccaggctgcacagcaggaggtgagcagcaggggagggagcattactgactgagctccgccgcctgtcaggtcagcatcggtgttagcggaactgtgtgtgagggatctaggttgcacgccccttttgagaatctaactaatgcctgatgatctgaggcggaggccagatggtttcatcctgaaaccatcctcccaagcccccatttgtggaaaaattgtcttacatgaaactggtccttgttgccaaaaaaaagttgggggccactggtttagatcttgcagtattgtgaagtaatttttggtcttctgagagactccaagcagcacaccagcatgaaaagatgagccattcacggcagctcttggcattggttttaagatgaaatacatcaatattaaaaataactataaaacattcatgaaagtttttggagtttctttgaagaatgtctttgaagctgacttaacattattgcatttattacagttgctctgcagttcaactgggctttataggtttgcatctggggttcacatatgcattttaagacgaggtttgagtctgtttgtataaatcaaatgcagtcctcagactcatgtgcaggccgcatggcgatcccgggatgaagtagatatttctatttataaacagattcctgagtacttcagatattatttgtatgttggactcctgtctagaattggcacatatctacatgtacagagaagaataatgaaatgtcaggggtctcactgcaccctcctctttgatcccattctctgaggttttaatttgggcccaggaagcagcacttaaatatccctactccagctgctagcttcaaacaatacaaagctaggcttccaaatatatttatcatttcttggttgaatatttgcaaaaactgacctaccctacgatttctctcaaataggccttagcaactacaaatatggatgagaagatagaaagggaagctttatgtttgcttgcattttagctaaaagataattagaagtgcaatttaagttatgataatggaaaaaaagagctacacgttaagtgtggtgcattgactgcatcgagaaaaggtgcagtctaaagcccagcaaagcttaaaagagaaaaactagaaaaaaagaactttttggaatataaactgtgacagattttttgtattttctgtgggcttgaaaagtccttaacgttttcgttgttactgccctggtactatttatgtgttagaatacagaacaactttaaatttgtggagtcttatcagtaggactgctggctttgcgaaacccgtgcaaaacggacactttgaagtgaccttccctgtttaactcatccgctcctcccttcagtgagtacatactactgtgtgcggtgtgctcttccagatgctgggatgcagtagtgaatggagacaaagcccctgtcctcatgggcttagactccagcttatgacttgttgtttataataaataatgaacattgtgaggttattcacaggaagggatgaataatggatggatcttcaaaacgtgattctggttaactacagacatcctgaagttccaggtataaaaagccttctttaaagcatactatagcagtcagaatgaatgagtagttaataaagctctttgctgaaataaaagcaaatatgttcacacttccaaaaaataaatacccaagtgggagttgtatggttctgatgtcaaacatgttatgagaccatcagaggtatatggaaatttggggaggaagacagtaattatataaaagtgcatgcaagcctgggcaatatagggagaccctgtcagcctgcaaaaaaataatgataataaaaaatcgtagctgaaggtggtggcatatacctgtgggtcccagctgcttgggaggctaaggtagaatcactaaggagaatcacttggggcagggaagtggtggctgcagtgagctatgattgtgctattgcactccagcctgggcgacagaacgagaccttgtctcacgcacacgaaaagcaattactgaattagagatgtgatgtgggaaacgctcccatctaagtaatgaccaagaatattccgtgatagagatgaagtcttagcaggacttccctctcaggttattagtggtgatgatcctgctttgttttattaccttattactattatgctctctgaggtatgaagtgatattaatctgtttgcagtgagaaataacactttatagcattgctatcatttaaacatattaaaatatgttgtaatgcagaaaaacaccctggggagagaggtgaaaacttaggagtttaatttgaaatgcagttgggaaattatttggacagcagagaaagctttagggcaaaatttcagtaataaagtatattattttctaaattattcatcagggagttgagtttgtttttcatgtacctggacttaatcacgattacaaaaaaatgcttagctaattgtagtcattcatctatactaatccaaaaacaaaaatgaggagttattgatggtttttatttaggtaaaacaatttatttgactgtgagtggttacatatgataaccatatattcagttatttctaacttgcctgttttgtgaagaatgctattttgtgactgttcctgcgtctcgctatgttttgggggttctggcctagttcctacaacatatactcttatcccggttctgtgttgtcctggtgattctcccaagagctaatcagttaaagagattttcttttccattttggattttagcttggagttttactcttagtagtaaaatggtatctaaaaataaaacggggaagaattagaacatgtcagatatagtaacacgttttaataatttgctctaaaaatctgctcatcagctgataacctttcgtttgtccacatgtctgctttttaaaacgcttggtttcttaatatcccagtgagaacaggcacctgcagagatacttagttgctcccagccgcagctgcagagcgacttctagattctgcgtatcttggtttatttcatgctgttttctttaagccatactgtctgctggtcagatggtaagagatacctgttttggaaaatttggtaaataatccagggttacaagtaaatttagcataatgtagaggctttattttgctcatttaaaatatgtagtcttggccaggcacagtggatcacacctgtaatcccagcactttgggaggctgaggcaggtggatcacttgacgtcaggagttcgagaccagcctggtcaacacgatgaaaccccgtctctactaataatacaaaaattagttgggcgtggtggtatgcgcctgtaattccagctactggggaggctgaggcatgagaatctcttgaacctgggaggtagaggttacagtgagccgagatcatatcactgcactccagtctgggtgacagagtgaaactgtgtctccaaaaaataaaataaaataaatcaaaataaaataaaaataaaataaaataaaataaaataaaaatagtgttggctgggtgtgatggctcatgcctgtaattccagcactttggaaggccaaggcgagaggatcatttgaggccaggagtttgagaccagcctgggcaacatagtgagaccccatcactacaaaatataaaaaattagctgggtgtggtggcactcgcctgtagtcccagctattcaggaggctgatgcagaaggattgcttgagcccaggagttcaaggctgaagtgggccaggatctcatcattgcactccagcctgggcgacagagtaagaccctatttctaaaataaataaataaaacatgtagttttacctctattcagcaattagattccttacaactcataaactgtatgagaaattgaattccactgtttttgtcactgagaatgctcttgtcctagcagacctgtgtgtgctaaattaaggtctgatctccatcagtcactaagatgtggccaaacataaaggcttttcatagttgttataccccgtaagtgatgaccctgagaaatgagagtgagactgtcaaggtacatcttttgtccttattccctagattagttcttgaaataagccaccagttaagaattttgggatttcctgtgcactggcagtggttgaagggtttaacatgcctgaaaccttgagcacaaatccctcctgcagctgccctgggccatgtcagccggcaccagccatgctgtggcaccagagaataagcctgcacttaatgtcatagcatttcagagaactgtcggagcgtggggctggcccttgggatttagctgctgcttgtatgaagcagttttaaaatattaagcttagaaaagtcccactgagctgggtaaagactttgtgtcctttgggtccctctctatgttttatcagttttcagctgcagggcagatgtctcccctgggctgcagtcttaggcactaagatgtgttgctggcagatttgactctagaagccccaaagggcaggcagggataaatagttttgaattttgtttctagtctcttctgtgttgtattggtttcagagttcagtatccagtcacagtggacagttttgtagtattttgcagcctaaaaaatttatgcaagcagtaaattaaaaatctgaaaaacacacgcatacacatgtgtgcacacgaaggcacatacacatccctccatggagtcttccactcttgtgtgttttgtaattctctttatttttatttgtttacttggagacagggtctcgctctgttgcccagggtagagtgcagtggtgcaatcatagctcagtgcagcctccacctgctgggctcaagcaagcctcccacctcagcctcccaagtagctgggactacaggtgcgcaccaccatgcccagttaattttctaattttttggtagagatggagtctcactatgttgcccaggccaacctttaactcctggtctcaggtgatcctccccagttgtacctctcagactgattataggtgtgagccgccacacctgacctataattttattttagatttacatgagaagtgatgctgttttaaagtgtaatgctctgaattaaaggaattctctatggtaatatatttatacataacaaagcactaacaattacagaaggccttgatgcctgttctattattcgttttatgtttctgtgagtaattgatgctttgatgtattttggccatagaggcactattgtaatgcatgtagactgactttcactggacagaggtttgctgagctggttctgttcatgtgctatggctggagacatgaggcagaggacacagaggccctgccctgatggcactcacactgtaaacttgaggcaatgaggacgcacagttaggagctgaagttgtaccacagaacacataaagggagagttagacacaagacgagggggctccaggtgagccagtgagagccgtggggccttctgtccctccagccagcagacgctgagtgactgcaggacccagccgattccaggttcccgagcaagctgccttctgtgcttgtgatttttatgttgtggggggattgatggtgccgcctcaggtggagatcagtgtgacggagtccacagggcaggatagaacactggatgtgtgcagtagggtcttaggccaagtccactttctctgatgggggagcatttcagcaaaggcccttctgggcatatgaaggtttcccagtcagttatcagggcaatgggaagccacagagctgggggtctgctggagagtgatcaggcttgagcgttaataaggtcatctggctgcactgtaggtgatggagccaggtaagaggccctgtagtctaggcaggaggtgtgggtagctctgaccagcagtggaaagagggcaaagtggccagatttgagagatgctatttagggaggtggattggaagggctctcgtgggggtcatggggagggggccgtctaggtagctgtcctcagggtttatcatgggtaccacagagaagggaagacatttgggcagtcacttagcaaatttggggcatgccgagtgggggtgccatgtggcattcaaattgcagtttgtgcaggtaatcaaactaggggcttaggagaggcctggggaggagaaatggacctggaagttctccgccaggtggagtgactcagggtctcaggaagagcaggctggtgaggcagagccagggtgtggggcagagtgagtggaaggccgtgagaggcagggccagatggggctgggtggatcaaggaagaggagggtcaagggcgggctttcatttgagagggtgtagaaagcaaaagaatgtttttagaaagattcatgacagctgggccctttgacgtggtagttggaaggattgagtggagagagggaggtggagagtacagaagcagcaagggatgacagagggtgcgaggcagggcaggaggctcaggaaggcagggactgtgtgcatgggggccatgagccttgggtgggcggggatcccatgtacccaggtatgggcccagggtggacaggggccgtgcttacagggcgaggggccccaggtgagtggatactgcccgcaggggtgatgtgcccccggtgggctctgggcagtgtcccagtgctacccctcggccctgggaccttaggtgttcattaccatttagtcttgtttacagcctgggagtttctagtcaagcacagctggtggggaggctccgtgcctcttctcctctgccacctccacccttgtgccctcctccacgctcccttctggatgcctcatgcacctgtatttcacgtgcaggacagggttccatggtctgtcagccaccacctactgagctgttcccacgaggcgcatgcctcccagccagtgggtcatcagcccatttcacgaatgggggcaggctcaggactgatgaactgcggcacagctcacccagccatgcgtggtgctccgccatgtggagaactatgttgcctcccctgcggaggccatcggtgagggggtgctgggccatgaggacttgggtgggctggggctgtgtgcagaatggcctcctgtttcttacacgccaaggcttcctccaggccctgagatttttcatgcagtgccttttactagtatgtaatcttccagtaaagaccactgttcagtcaaagaccagaatgcagggctcaaatactttcaggttccgccattgcagacgttagcccaggtaggactgtgcctttctgctgaagaagcaaagataggccaagccccagtccctcctccaggcttccccggcagctcagggtgcgggcaggtgccgggagggagaacctggttaattttaattggcttacatttttggcctctgtgatttccttgttggcctccttgggtgtgtgtttaattcaagtaagagttcattatcggagttcttttaattataaaataaagtgtgttcgtggtaaggaggtcacatcatagaaagctgtagggaagaaactggaagtgcctttcatctcctcccccacctaactccccagaattaatcacaaatacttttgtgtgtatattgttctggaaattgtaaatgtttaaacaaatctactaaggtatactcttctgaaattttcctttgaaaatttagtttataatttggatttatttcttgatgagcacatgctaaactcattccacccttttttgatgaaaattattacatgtttattaatatatcacattccctccctccctgtcccttttttcccccataaaacacaatactgcagtgaatttgtttgaatacatcccacagaatatatagctggcaatggcattgctgggtaaaagggagtgtgcatttaaagtttggataggtgttgtcaaattgtgttccctaaaagtgcttttttttttttttttttttttttttttgagatggagtctcactctgttgtccaagctggagtacagtggcgctttcttggctcaccacagcctccacctcccggtttcaagcaaactcgtgcttcagccccctgagtagctgggactataggcgcatgccaccatgcccagctaatttttgtatttttagtatagagagggtttcaccatgttagacaggccccctgagtagctgggactataggtgcatgccaccacgcccagctaatttttgtatttttagtagagacagggtttcaccatgttagacaggctgatttcaaactcctgacctcaggtgatctgcctgccttggcctcccaaagtactggtattacaggtgtgagccacggtgcccagccaaaaatgccttttaaaaggtgcatatgattttcagttccagcttcactgagtattagaatcttttaaagaacgtttcagggtgcccagaccctttgctcttgtaggattcacgcctgcagcctccaggcccagggatggggcaggtgtgctgtgcagttgctgtgggcctcactgtgtcatggtgcactccaccctcattgctgtagcctcgcttgttctttcttcagttgtacaagaggaagactgagactgctagtcagagggattggtattttcttctgttctgaatatagaatcttgggaggttttatggagagaaattaagggcatgtctgtcttttatctatgtttgtatgtaacatggtgtttaatgaatataacccatgtgctaggtgcttcacataaatggattctcataacactctgcgaggtatctgctcttttactgtgtgtgtgtggtgtgtgtgtgtgtgtgtgtcttactctgttaccgaggctggagtgcagtgttgcaattatagctcactgcagccttgatctcctggcctcaagcagttctcccacctcagcctcccaagtagctgggactacaggtacaagcatgtaccaccagctaattttttattctttaaatgttttgtagaaatggggtattgctctgttgcccgggctggtcttgagctcctggcctctagcagtcctcctgctttggcctcgcaaagtggtggcattagaggtgtgaggtacagtgcccagtctgttttccgtgttttgtaatttaataagatgtgagcctcaagaccattagtgagtggtaaagctgagatttgattctcatcctccaccacactaacggggatgtgccctagggcatgaaatgcttcattcctgtttgtttaaaaacgtgttttttttccttgtgttttcctatgtattttattttttttttacttttatttttatttttttgagacagagtcttgctcttttgctcacagcaacctttgcctcctgtgttcaagggattctcctacctcagcctcccgagtagctgggattacagtcacgtgccaccatgcctggctaatttttgtatttttagtagagatggggtttcaccatgttggtcaggctggtcttgaactcctgacctcaggtgatccatctgcctaggcctcccaaagtgctgggattacaggtgtgagccactgcacccaggtgtaatttggtatcatctttatacatcttcatgcctactcatatcttctttcatagattagaatgaatttgagaacagaggaaattttagacattatgctaatggcatgaggatcctaggcctagttagaagtcatctttgaaataacttcatagagccgtatttcatatttctcttctaagaattgtgaaagaacttaattttatttccccagagagagaactataaatcatacgtatatagtaacaaagacaaagaatgtttgtggaggattgaactcaatttagaactgatttacacatcagagcaagcctgctgaaagcataagatttttacgtggttttgccagacaggttgaagggactatattaaggataaatagttgagctgttttgtggtatttttatttcaaaatacccagaaatggaaagcagtacttttcttgtttgggtgtgattcatggactgtccagcagagggcactgccagtttgtgagtgagcatccttgctggcagctgagtgagcctgcgcctgcacttcccagaggaaatgggtctgagtgtgatgtggaaatagttacattttattttagaatgttgtcatgaaagttatcataggtgtcataatagcatttgtaaggtgtcacagaagatattgctgtttcctgctacctagatgtactgaacattttgcagttagctacttagcatggtttagctaattggggactgttactgacacatggctggatccctactttgcctctcctccttgaatttgagttatataaaggaaatctcagtacttaggaatttaggggaaaatgtttaatttttgatgtgtaaccaagaagaaagcatggcagtttcttattggtggcttcatgacttactgtgaatttttaatttttctgaaatctcaggtatttctttccttgctgtgaatcctgggaaatgattgcatttgaagtggagaatcacacagcctcctttagtccactctccacaatgtccaaattatcttttggttattcttttgtctaccagactatcacagccattatattctgtggactgaattgtcagttttctccactgtaagaatggcgggtgcacagtccgtgtgtcttgtttatgtgtacacttgcagatacagagttgtttttgcctcagcttttcctatgtaaaagttttaagtactgtgtaaacatgcttgtatacctggcttttgaatatatttcacgcctgcaaacttaattatttgatgtgcatggaagttgtagaagagatcacttggtttttctcttaggttcacttctgtttttgtttctcttgctccttcaactcactgatgacaggtgctttccaaactgccggcctgatgcagaggtgctgattccccatttgctctgcccttctttagggctgctgtaccggcagtgcccactggggggcagcgtgattgcacaccagcctgcaagggtctccttggctttcttttcagttggcaggtgtggggggcatttttgagaacaaagcacattattactgaacgctgaaacccccagtgacaaagcattgtagtgaattcaaatgcacgatccgggaaattctcggagcctctgcgactggtctctccagcagggcctgatacacaggatcacttgtaattaaaactaacacttgtggatgggggtgagctctcacgttaatggacgtttctcattgtacaacattcaaaatatgtggcaggcctttgataaggagtcttttttctttcatcccttgaatagttatgaggtgtggaaataagaggagttagttgggaaaaagcttgcatgctggctttgtcgttgtttttgaaaagaatggaaaatacttgcaaataaaggcacatggattattttatccatcttgcacaaaactgggctcatagcacctgatggagtcctggctaacaggtttattttacttattgatttctggaaataaagcaggcactaaaccggaccacttaactatttaaatccttgcaatagggtataattgtactttcagatttgtttttatatcagttgtgcaacatgtctcaggcagtcatcttgattttaagttcctttcttttaagttcatgccttattctcaactttcttgctccgtaacagagctgtgaatggataagactcggtaggcatttgcctaaaaggttttgatgctaggaggaactgcacaattcctttgcccttcttggttttcctgtttcgtgcttattttttataagccgtgcattgctgtcgtgtgcagctgtgcaccctcctgctgcccgtcacggcatcgggtctttcctgtgggcctcctcgccctgccccaccttttctccaggcatgaatcctcccctagagcgcatgcagtcaaattaacgtggagacagagcccattatgaaggaaatcaatttattctaattgggtgacaacattaggcttgacgggaactagcacaccatcgtaagcatcatggttactttgactcttcgtgaggtgacttaggtgcagtgtgattttcgttttccatgcctccaccccgcagaagcacctgtgcggtaactgtctgggttcatgtgtcctgtgcttccaaagcctctcgccagcggcctttgtggtggggtggagggactggacagggggcacccagtgaattaacgccagagagtgtctggcctcagaagggccagcgagcaaaggggtgttagccccgagcccggatggaggaggcagcagtgtgggtttggatgacagagggaaagtagagatttgggaagaagagggtggaaacagggtgggtctccgtggattgcaggggagggtttgtctgcaggtgtacagggagtgctggccctggtttggtttaaactgatgagggccctgggcacatgcaaatgcgtaaatctatccttcaggcaagggatgaaaaaccgttgaagagttttggcttcttcttcttccttcttccttccgtcttccttccttcttccttcttccttccttccttcttccttcctttcttctttctttctttcttcttcttcttttttttttaatagaagaaaagttacttaagaaaagttatccttgcgtaaaaaaaaattctgtggagggaatatggggtgggaggtgtccaggctctgttctcattgacctgggattaaagacccagtctgcccacacactgtcagctttacaaccttaagtagttccagaaccttcccagactttgtctattaatctgggtaatatcaactcacacagcaaatgtgaggagaaagttctactgtatttatagaagtccagctcagttctgggacataccggtaggtgctcacttgttcttttctcttcctacatcatcctttaagattgaatgaatagcaaagaagaaaaactaaaacaagtatctcatcgagtgttttctacataccagttgaccaacctcaaggaatggaccatttagcagacttggttggtgtgttcagagtcataggcatataaatttgagtcgtactgggtgctgttctgagtgctttactatctcccttagttctgtagcaaccctgtcacattgagaccccttaccactaccgtcattgtcgtacccctgtggtccctcaggataggcaggaaagttaagaaactttcccatgtggggaaaaggagctgagccccaaatgcacactctctggctctagggcccaagccctcagccttatgcctggcatctctcgctcagacaggtaaccacaagctgacttattgcccaatactttctggctacccctatttgaaatcctatgcctttagcatttatctgcaaatagaatcagaagaccggcaacatggtgggctgagagcacccatggggagaagccttgaattcatccatggagcttgaacacgtcgctgcatttctccagttctcctcctcctttgaaaatgtcttaaatatgtatttttctataacctcatgttagaagtgaatctccggttttgagcagtgttttcagtggagccatcgtgatgccatctgggtgtgctctgaaacacagtgactatttggggacccagtgtaggccgccattcttcaggtggacgctagacatgaagcaccactgtgccctggactcctgcttcgcctgtggtgatgccatcatggctgtcccctcacctcattcatgttcagattccccctgtttgctttttgatgccttttgttcccagcactccagcttcaatcttaactagaaatcacccaacaaactgaaaaagctcccagttctggaaatggtactttgcagctttcattctgcccgtaatacatttgaaagcaccaagtttagggtctcagcaaaaagccaaagctgtctccatgtttcatttgaaggtacttttgttttcagttgtttctttgtgcatgtaagagcattttttgccctgtttttgtttctttccttcttattgaatggaacaattctttaaaaccttgtacctatcctgctttcagtttcttctgtttatttaaagcctgagtatttcttgtttagttataacagcagtagtacatgctaatgggaaagaaaatggagaagtgtgtaaactggaaaataaataaaaatgtcctgaataccacattccttccctcccctggagggaaaacattatcttttttttcccgcatccttccagaaattttctgcacatatatgagcattttaagcacacccacacgcacaaatggtttcccgctatacgtactgttctgccagtatatcttggataagtttccgcatcagcaaatgtagattgacttcatctgttaacagctccttagtaattaggggataatttctcacaactcccctattttttctgggtttccaaacaagccgccttggatctattcccagggttctccccaaatagtgctcttccagttctgcttcctttaggaaggagtttcatcttctagtgtcatctattcctgccattgtgtagcttcctgggtctgttactgattaccttttgaataagaaagggacaggtcagaggactcaggctggaactagacaggtcaatgtagttgagtatggaataggggttaaaatggacgctaatggccttctacttaaaactctcaaaactagagaaaggaaaagtgaagccacagtgaaatgtcacctccctcttgttagaatagctgttatccagaagaccccacaaaatgaccagtattgtgaggatgtggagaaaaaggaaccctcatacactgttggtgggaatgtaaattaatacagacattatggaaaacagcatggaagttcttcaaaaacctaaaaatagaacttaccatatggtccagcaatcctacttctgggtgtttacctgaaagatttgaaatcaatatgtcgaagagatgtctccacacccgtgtttgttgcagcgccgttcactgtagctaagatacggcaccagcctacgttggacggatggataaatggtctgtatacacagtgcagtactagtcagtcataaaacaggaagaacttctgtcatctgtgacaacgtgtatggaactagagaacattgtgttaggtgaaataagccaaacacagaaagacaaatactgcctgttttcacggatacgcagaatctgaaaccattaaactcacagaagcaaagaggaatgggggttagaggttgggaggttagcggttgggaggggggttggggagatcgtaaccaaagggcacaaagcctgggttacataggaggcataggtttgatttatttcttattcttttttttggagctctgttacatggtgtagtgaatgtagctaataattgagttccgtacattttaatactgctgagagtaaatttcatatgttctcatcataaaaaatgttgaatatttgaggggatggaaatgttagttaacttgatttattcattccacattgtattaaacaataacatcacttttgtacctcaatgataacttgtcaatatacaagagaaatttaagaaatctcaaatcttgagcctccaagtcaggcgagcccctgggggtgaaagccccgctctgttgtttggcctgcaggttggcctcccttcttagcctctgcgcagcctcctcggttcctccccgagccacctgtggccactggagctctgttaagccaacgggaagtaaagacactccaaccatgcattagaaaaatcacaatcggaatgataattgattccttctgtttgaatctattggagtgttacagatgctttgatgaaggtaagacttgctgggtttatcctctagagctgtacgctactaatgctttgtatttatgtataatcagtataataagcttttgactgcataagattcttattttcaaaatatacatttttagctaccccatttctaatttctctcaaaagcagcatttctgatttgtatctacctggtacagatgccagaggagctggtgttggcagtattatctgtgtttacctacatcgaactgttcataccttcttctgagatactgttcttctctggtctgtcttttgccagccccttaaaaccaaagttaattcctttgtcctacatgggactgatttgcttaggagaaaagtgatgccccactgtcccctggctaatggcgtgtgaaggttgtggtggcctccttagcgcagaggatggggctggattctgggagtacttcttaggattagggatgggggtgatctagggaatggaattgctgaagtcagcagggagtccactgctgaggtcctctttttgagacacggtcttgctttgtagcccaggctggagtgtagtggcgcaatctcggctcactgcaatctccgcctcttgggtccaagcaattctggtgcctcagcctctcaagtagctgggattacaggtgcctgccaccacacctggctaatttttgtatttttagtagagatggaatttcgccatgttggccaggctgatctcaaaagcctcccccttccaaagtgctgggattacaggcgtgagccactctgcctggcctcaggctaatatttctaattaaacatcaatacgagagacctaaaaatggacaactttgtcacttaaaaaacccaaaacatccacctattaagacctcagcggcggctggacatggtgctcacacctgtaatcccagtactttgggaggccaaggcaggtggatcacttgaggcgaggagtttgagaccagcttgggcaacatggtaagacctcgtttttacagaaaataaaaaatttaaccagatatagtggcatgtgcatatagtctcagctactcaggaggttggaggattgcttgagtgcaggaggttgaggctgtagtaagccaagattgtgccactgcacttcagcctgggtgacagaacattatatatttgcctgattatttcaagccaaaaaccagcctttgtgttatgaaattagagcaatttaggatttgttttctgcattttggcaattcctgtgatgctgtaggcatcagttacctgggcaggcagtaggtaaggaagtggggtcaggtcctttaccagcacttatagaaatgagaaacgaggctctcataccacctcttaatcactgccccctcctaagggtaagggctgatgacttggccttgagaatgtttttgctacacccaccccttctctctcatgttacttcaatcaatgtacttgccttgacgtcacggaccttttcgggccgtatgtgattgtgtttttgtaccacatttcgaggggaaaatgttggattgatggttgaagggcaggagaggaggggctgagtgggtacaccccgaaaggtaatcacatgggcattttgcctcagtgatcacttctgctaattatgatgacttgtggatttgggatactggaaaagaaaaatctaggctgggcacagtagctcatgcctgtaatcccaccactttgggagactgatgtaggcggatcacttggggcctggagtttgagagcagcctgggcaacatagcaagacccatctctacaaaaaaattaaacagttatccaggcgtggtggcatgcacctgtagccccagccacttgggaagctgaagtggcagggttgcatgagcccaggagtttgaggctgtagtgaaatatgattgcgccactgcactccagcctggagaccccttgtttcaataaataaataaataaataaataaataaataaataaatctgtttacagaaatcactatgtgtgtttgctcctcctagcacagccttggaggataagatgccaggtgcagtggctcatgcctgtaatcccagcactttgggaggccaaggtgggaggatcgcttgagctcaggagtttgagacaccaacatggtgaaacgctgactccacaaaaaatacaaaaattagccaggcatggtggcttgtgcatgtagtccccagttactccaggaggttgaggtgggaggatcacttgagcccaggaagcggaggttgcagtgagctgagattgtgccactgcactccagcctgtgtaatagaggaagaccctgtctccggaagaaaaaaaaaaaaaaaaagagagagagggaggataagggtggactaggatgctctggtcgggacttgtggccatagttggtcatgggtgtttggaggttgggaacctggatgtgaaaagctgcattcctgcaggaggagtctctgccacatctgggcagggtgttttgaccattgtttaaacttccttgaaatcaggcaaggcctggtcgtggatgcagaagggaatctgtttttccagttttggtgatcaagggtccagctccatgccgagtaagtgcaggcccacaaggagttgaaatgctttacgtttctaaactccaggagtaccattgctatgtcggtgattttagatcactttctccatttcctctctccctccctcttctagtttgataggccctaagtttaggcagcctgtgtaggggctacacgttttcatcagtaatacaggccgtgtttcgctgaccacagttggggacagctgcatgtattctttgtgtgttttgttttgttatacattagatacttagataaatatctacatatatgaaatatacttaatatctatgcatattctatctgtaatatttgcttattgaataaattaacactgtagaccactgacctacagaaaatgacagattatcccaaaaacagtcttaaaatctcctaataaaagctgcgggtcttgaatattttagtgtttattgttttaaataagtcactaaacaaagggttatgacaaccagatgaagtgttttatctcaaacattttagccactgggtggtctctttttaatgggtctcaaataatgcagtgcaatattaattttgatcagtctgtgtacatacatatgaaacttgcaactgaggccctctttgtaggttttcgtctagcagattggaagtgatctttcttgagttttcatttagccacactctgagcagcaaaacctattcccaaatctggattcattgaccttaacgtgtgtatgtgtgtgtgtgtgcacatgcacacacatacacgtgtagattgaggaaatacccccctttgtgcctttggatcactacttttgtacatgcagagcgaaagacttccttttgtttcttgtcaagggctataaagagagatcacattagtataacctttgcctcctaaggtgtagatgagtgagttgtggttggaatttaattttaacaggttttattgaactgctaaaagatattgaaaatgtttaatatgagagtccggggcagtaaatcacacacaggcttgttaaaatagatgtccacagtgtatgggcagatggagcctgtgtttctgcccagggacctttcattaccgcaccaattgggtacattattctcacctcataactctgcaatattagatggctgatagagatcgtggtgaaggaagaatttaacacccctctttccccattttgggggagggcttaaagacctattcttttacccatttataggccatttggcttttcacagggattttaaaaaatcatatttgaaggatgtagggaattttcatgtcacctgcaacattggctggtgtcgtgaaccactcctctctgtaatgcgtggaatttttgtttgtttcttgttcgtcatttttctctccactttcttttttcatttttaaatttttggttgttttccagtttttcactgcctcactctctaaaattatattgctccaaacacaggtgtatctgcctctctgtccatcctggtcaggcccatcagtgctgcgcagtgtggctgtcaaagctttttgctttctggcctctgtctctcaggcgtgatgaagccactcactccagggcagggctgccttatctccccaacggctaaggccaagtgcagctctgttattggagcacagccacacccactcgtttctgtaccgactgcagctgcttctcactgggacagcattgagcattggcgattcttgggacagaggatatattgcctgcaaagcctaaaatccatactctgtggccctttacagaagcatgtgctgagccttcacctaaattgtagcaggaattcaataaatgttgactgaatggacgtattagagatttcccaatcaggttttacttaatatgtacacagagtcactggtccctggcatttgactacttgaatactctgtagtaaagacacagcagagtatgtgcttgagcttatttcttgtggatggatcatcccatcccgttattactaaatgaaaatcttgtctaagctcctgtgcagtatctctcaacaggaaaagggaataatttggggagagaagttgccagagtttggaaagtattcccacgtagcatgggtgaacatcctgcatttattgtgaattggttccttcatcatggctgtgcaaatcccaggagagtggggcagattagggcacaacgtgtaaactcagcacctcttctgcctgggctttagagcagaaagcagactctgtccaccaagagggcttgcagcaactttggactcttcatgaagctgatgaggcaacctgtgtgtacccacctctgcccatcatttcttcctggaatcagtaatcttcccacataacactttaaactatttcagtcagagggcttatgtatggtctgttagttttgaagggacgtcataacaaagtaccaagaactggatggcttgacacacagaaactcattgtctcacagttctggaggctggaattctggcatcaaggctttggcagggtcacacccccctccccaaaggctctagagaagaacctgctccatgcctgttcctggcttcggaagcccaggtgttcctggccttgcaggtgcatcagtccagccctgcaccttcacctggccttctccctgtgtgtctgcacagcatcttccctttgcgtcttgtctgcctctgtgttcacacttcccctttttataaggacgttagtcatctcggattagggctcaccctaatgacctcattttaacttaattaatccaataaagatccgatctccaagtaaggtcacattctgacatactggagtttaggacttcacatatttttttgtcgggagaggggaacacaattcagttcataatagatgggcagctgggcacggtggctcatgcctgtaatcccagcacttcgggaggtcatggcaggagaattgcttgagctcaggagttcaagcctgagcaacaaagtgagatcccatctctgtttaaaacaaaaattgaaaattatcttgttgtggtggcacatgcctgtggtcccagctacttgggaggctaaggcaggaggatcccctgagccaaggaggtcaaggctgcagggctgcagtgagctgtgtttgtgccactgcactctaacctcagtgatagaataagaccccatctccaaaaaaaaaaaaaagatgggtatctcagatcaatataattcaaaagaatatttggctttgaaagtggagtcttataaaaatatagccaggcgaagatgacgtgtcatcctctgagcctagaaagtctggaacacgatcgcctgggcttatgcatgtgcctaggtgtgggtcgtggtggttatgacatttcactttggatgtgcacattccatcactcatatctttggctgcagttagaaggaagggagtgttttttgaaagcttgccctgaaattatagtatgtgcaactgtgttagatttgagtgtcataaccatgttcttcttgtgtgttttgtcagttccttggctaattttcagatgtttgcatccaaatatgagttagggctctcaaagcagtcagcattttcttctttattttacattttagtcataacagatataatatatgccctgtgagtggtttcagagattatgtaatgccaaaatgtagagttatgagttaatcacagaataatgtccaattacattgtttgttctctttgtcttcctttccatcccttggcctccccaaaaagaaagtgaaaaagaacaagctgtattcccacacagagaggggatgagagtcagaaagaaagaaagagagagagagaaacagataagacacttcacacacagagaggaggggggagagagaaagtgtacacacacagggacagtgagtgacttgaaaagggctgctagtgtaccttccattccactccatgaacgcgtgagagaatgagcattaaatggaggtgtgagtctgctcttctcttggtcccaactcctggctgtccagggtcagcatcttgctgcattgaatgtaattccaatgtttacaggtcctcctttctttttggggaagagggagtggtcttttatgacccttgaacacaagccagctacttcatctttgaggggaccaaaacaatagcaatctgtttactactgggcagtttgaagatattttgagatagaatattgattaggcaaggtctcggcatctcttttgagttagacttaagaacctgtccccacattaagatggggctctggtgaagttgacttgtttttgtttttgttttgaggtggagtttcgctcttattgctcagtctggagtgcaatggtgtgatctcggctcacctcaatctccgcttccccagttcaagctattctcctgcctcagcctcccaagtagctgggattacaggcatgcgccatcacgcctggctaatttttatttttagtagagacagggtttctccatgttagtcaggctggtctcaaactcccgacctcaggtgatccacctgcctcagcctcccaaagtgctgggattacaggcgtgagccaccgcgcctggccttgaagttgacttttcatcttactttgaatcccttcaattcctttgttttcaagtcgaaaaccctccactcaggcctcattaacaggaaatgaccgagcttgtacttttctagctacgttgtgtcaacttgagtgcatggactaaaaccacctgtgtgtggagtccccaagcccaccaccagcgcaggcacctgctgtgcttctgcacctggagatgggctttccctgagttgggtctcaccagcagcccagatttacaccaagaaatttgccaggttcatagttggtgctcagtaagtgtattgtttaagctcctttctgatttcacaaagtaattgctgccgactgtactcataggagttccaggagcctccatgagaactgtaaagtcttaacttgcttagaaagcacattttaaagcttttcctgctgcagtcagaacctgaaagaataggctgtggcctcagaatctacaggcacactcagtttttgactctgtcttatagatccttgacaacattggggactgttaacatggtttttatgcccccaaatcagttatatggaagaaggtccctgtggaagctgagcagttgagcttgtccagggctgagggctccgtgagaggtcacctttcttagctcttgtatgtctttgcagcccagggctcagagctgttgacatgtgcttgttgaggtctggtgacccatacccctggcctgagccctgagaagccggttccccagcagtgtgacctgggttgcatgggaggctttctcagagcttgtctggggccttgtcttgctgcagtgggacgtgggccctggaggacgcagccccgacagccctcacctggttgacatcagagcgggctgagcagctggcactgtggggtttcttggggatctgcgttgcagaggggcctgtgcagggcacagtgtcagcctcctgtcctctccaccatcatcctcctgtctgtagggaggcccagaggagccagttgaatgaaggcctgtcctcctcctggtggcttctgggctcagtgcctgacattgggtcttactggctacatcagccgctgagtgcaccaaggatctgtgacatctcagaggcctcacccgaccctgaagtgacacggctcactgtttctgctctgggtacatgaacagggactgtttattctgattctgtggctttgagcagaaatcgatttgtctgaaaagactgcccttagtcacaacagatccttttcgttgtggttttttttacctagttttctttcaataagttctttcctcacagctgtgggatgagggtcaaaacatcatgcttgataggtcaaagctgctgcttctattccaactgctaccttcccagcagaaagggccgtttaacttgttacacaccttttcctgcttagaacaaggtcacagatattagcgtgggagacgcatgcagtcatgaaacgcagttcttcactgaaggattctagagtctccttggcagataatgggaaacatcaacaaaaaaccatgtggaataggagccgtgtgcacacaatcacgtgttgttcctagagaccaggcagctggtgcctgggaccagcagagcaaggacagctgcatgcgcgctgacttttttttttttttttgagacggagtcttgctctgtggcccaggctggagtgcagtggtagatctcagctcactgcaacctctgcctcccagattcaagtgattctcctgcctcagcctcccaagtaggtgggactacaggtgcgcgccaccatgcttggctaattttttgtatttttagtagagtcagggtttcaccgtgttagccaggatggtttcgatctcctgacctcgtgatccgccccacttcgtcctcccaaagtgctgggattacaggcatgagcccctgcacctggccctgcactgacattgttaaacaggtctgtctggagtgggtggagctggggtttagggggttcaagagtggattggtttgttacttttgctgagatgtacctagttaaagctttttcaactcttcttggttaactataggaagtctctcttagtcttcctttcagtcacttgttttattaagacagtaaaacactctgatccagaggttttaaatagagatgctttgttttcaattaaagttgaagatttaagttatttaaaactgaacgtaattattgaagggaaggagagtttgagggcctattcaaagattcgtagaaaattcccattttggtgtagtagtaccattaaataatgcatatctaatgtgcataaatacttgtctgcagaaatcatgtctgctataaataggtgtcagacatggagaaatgcaggtccttcatgggtgggaacagccttcggtggtgttcctgggcttctcttgtatgtgttaatgacacagccgtgaaagtatcatttttcactttcgactgtcgaagcccagcttatattcccatatgcttttgtgtgtctttgtagagcactcttagggtggatttttgcaatttcatcacttttcttactctgccttcaggggccagaaacactgaagtttcacatgtgacctgtacactcttacagctcttatacatggctgaggggccaggagaggaaaacaccacagtccatttgtcaggaaaaaaagacacacatggggaaaaaggtcctgaaaagacccactttacactcttcatagtgattacttcaggaggattataagaaataatattaatatggaatatggcctgtgtactaaaaaaaaaaaaaaaaaagaaaaaaagaaaaccaactcaggcaatgtaagtcattgaacagtttgattcctgtagacacctctattactgttcggccttagattttctcctaacaaaattatcttgttttcccaaaagcttcttgtttttgtgaagaaactgaaaatgactggctgaagtttgtccaagaaattcattcaaccgtaatttattcagtgtttccatgtagcctgatggggcctaactggaattgataatcttgcttacaaatacaaactcatttttatcactgaaatgactttctcccccaaccatcaaggagggaataacttctcttgtgacaaatatttttgaacctgtgcttttctaacaattgaaatggccagctttttagatgaaagttctaatgtattatttttagaaatttcagagaaggaaacaaataatttgcttatctgatgtccctttgtatgttaatttatggtatcttgaggctttgagttttaatttaaaccagcttcagtctgaaaattcagaattaatatttatatcaaatacatgcaaaatgtataaatctgaacaaattcgtttcttcagaataaatgatgatcttggacttatgttcctggaatgttttccaaattgagttttataattatctttttttctgcatatttctaatagatgtgtaatattgccctgtttaaggaattctattctttaacaaggaatgttgtcagatgtaatataagcttgatttaagtaaaataatgtaatcgatggcaggtataggaatggccacctttatgagtgctggttcttctactgaattttaagatatgtgaaaactaaataatgattaaataaatgattgatagtcacgtattgattgataactctttttcttcaacttacatggactgttacaacctctgagcaccatggtttgggaatttactttatcaaaatacattttatgtgaaataatgtttggatacacaatcttttttcagttttggtactatgaagttggtttaataagaaaagaatctgacatttaaaaaattgtaaaatctgcacatgatgtaattgcatttgtgtttattgaagtagtttgttataaaaacttgtagagaacaataacaatatccatgctcctttagaaagtgtagtgtgtaaataatcagtgtagtgatttttttaaaaggtgtcaaggtagcagtgctctttctttcagtttgtgcagtaaactgtggggtttgggttctgtcttaggggtttccaggcgtgttcttgaaatgctaggaatgtacaaatacgtcatgttccagtgttaaaagttggaaactaggccgggcgcggtggcttgcctgtacaaccggcaccttgggaggccgagcgtgggtggatcacttgaggtcaggagtttgagaccagcctggccaatgtggcaaaaccctgtctctactaaaaatacaaaaattagccgggcgtggtggcacatacctgtaatcccagctaatcagaaggctgaaacacgagagccacttaaacctgggaggtggagtttcagtgagcctgggtgacagagactcttccctcccctcaaagaaacccccaaaacaacaacaaaaaaaacccccaaaaaaacaaaaacaaaaaacaaacaacaaaaaaagtggaaactactgattctttcatgtgtcctgccagatgaaatctttttctgcgcaaaccttagactagagctggcatctcctgccatctctgttcaaaggtttctccaatgtactgttactggggaaggttgggttttcaccctggcccactctggtaaatgtgtaccatttttgtatgtggcaattgcacttgtacaccaggcttagttaagtgccagggaagttgtagatgcttcacttgtgtaataatgaaagaacacatgtagcaaaatgtggcaagatgtatttttttgtgcatatgtggtttttcttttttctttattggcctattctaaggaatgggtgcttgtttctcctgcagttttcataaaaaatgagagctggttcattgttagtgattcaactttttgactaagaaatttcccacttctttttcaagcttttgaatccgtttaattaaagagcatcctgaaattgcaaggtgagctttttatctatttatctgtgagaggtttaagctgatgctttgtaagtagaacagaaatgcagaaacaaattggatttcaaggttgatgtaatgctccatcccaatttccagttactgttttgttcatcaaacagcctcgtcgtttcctttgattgtctttttaataagaaatgggcatgcattccaaattaaaagataaatttatgctaatgttgacttcagctcttttatgtattaaggttttgtgaaatgttttgtttgcaaaatgggtcctcctgtttcagatgggggaatgaggaagagagacacttcctacatcacaaaaaacctcttggtttccaggaatggtgaatttggaccttataaatgggatctgggatcacaaatgggcgtgggtttcactgctttggctaccagtggaggagtaggagtcatatcttggttgtcagggaggtgggtgatgtcttctgaataaattggtggcatttgggagcaagaacacagaataaccaaggggaggtgagattataccacatgccagtggttgatgatctgggcatatatggcatgggtgattatttgaacaatatctatattttatgcttatttttaactccatgagagtggggtctctgaggaggaggtggtggtggtgtgtgtgttctttatatcccaggtgcctggcctcaaggtatttgttgagtgaatgcatgaagggatgaaccttcataagggttcattctgctattatattatgcagaaacagagagaggtaagcttattttatacaatatcagggagaaggctggagagccagtgtcaggaacagtttcctgaagtcagagctctcaaacattgaggttggctgcctgtggaggaagggagttcaggtaaagggtgagcagtagaaatattgtagaggacattcaaagatttttaactggtagttaaaccagatgatcctaaaatgctatttatattctgagactccattaaatatttgagcacctactgtttccataacaatgtgagcatcacagcagacagattcagcagtgtgagaaacgagatgactacccatgctggagtattccaatctcatggtggtggtggtaaaataaaaattaaaaaagaaaaaagttggcaaataacattataattctatacaataaaatgcaggatatttaagctatttattcattcaataaatatttgaatgccaataaacttcataagtgtcagcatcaccattgtagttgaagagagaacaacacaattttttaggagaaggtggagttgagctacaccgtaaagactttatgggactgtgggccgggcatgatggctcacatctgtaatcccagcactttgggaggctgaggcggacagatcacttgaggtcagcagttcgagaccagcctggccaacacgtgaaaccccgtctctaccaaaaatacaaaatttagccaggcgtggtggtgcatgcctgtaatttcagctacttgggaaggtgaggcacaagaattgcttgaacccaggaggtggaagttgcagtgagccaagatcatgccactgtactccagcctgggtgacagactgagactctgtctcaaaaaaaaaaagaaaaaaaaaaaaggctttatgggactatattggtgaactctagagcatccagtgaggggctgtgggatgagtgaaagctaatttctaagaatcacgaggtgtgctctgaggacaaagaggaaaccttagggaagtggcaccaagtgaaaccagaaaggagactgggatcatattgtggttgaccttaaatattaccttagtgttgaggagtcacctgtgtaactgaggagagaggaggaggtgtgcatgactccagcaggttggaaaaagccagtgcctctgccagacaggaatgtggaacgggtggaaagtggtgtgatcttagatgtgtagagtgtgatattttggaaatcctattggaaacagtcagtcaggaaggatgtcctagctaagaagacatttgaagttttgaaagtggctcatctatttcctgattgatacataccattagttcagtttgggtctattattttttgggtccagttttttttttaaaatgaattgataggcatgtttaccagagtgctattactttgtttttggagatgtcactttctcatttttacctgaattgtgacttactttgccactgttgtggaagcgttcttacattctgacttcacagtacaagatgtcacttgatgtcaccaagagttaagaaaagctattttaagtatgctggaaaaggaatctatttcagtgtttgcgggagtcactattttgaagcaaactaagaatttctaaggagcttggagacttgcacatcttctgatattgggaggtcttaggttaaaagacttttttatttggattcattaattgagtgtaggtcattgttaatggaaaatcgttgaacacttaataaatacagctatgtttaaagttcttaaaaatttaaatacagattaggaagcccaaatttcagaggaactggtagaggatttgtgctttgtttttaatgttttaaacagccctgtggttatagtttagaaaggtcatagttttgacggtcctctattaaaagaaagtgatttttccatcagaatacagttgagtgccacagtgtatagagaagccatagctaatactttaaaatgttttacttttaaaatttcaaaacaaactgtaggttttaaaagttttctctctcacagttttaacccaatctgagaaataaaaaagtaaaaaaaaataaatgtataattttgatctctctaggctgagcccctagagtgtagccctttattccttgaaggaggcatccctttagtgagtttaaatttatgaagccagtcccatgaaggctgcctactcatgtctcccttgccttcagtctgtgtgtgctttgcttttaatttgagaaataatcacttggttgtggtcttgtggaccaaatactgtgttatctatagacaaattgaaatgtactttaaacattattttattatttttgacaaaaattatacatatttatggcatacggtgtgatatttaagtgatgtgtaatggtcaaattagggtaagtagtatatcagtcacttcaaacatttttcatttctttgtattgggaacattaaaaattttctcttccagccatttgaaaatacacaatacattagtatttgttttcaccctacagggccttagaccactagaacttaattcttcctatctagctgtaattttgtgtctgttaaccaatctcttcctaccttccccttcccagtctctggtaagcactggcttactctctacttctatgagatcaactttttatttttatttatttatttattttttgagacagagtcttgctctgtcgcccaggctggagtgtaatggtgcgtgatctcggctcactgcagcctccacctcccgtgttcaagtgattctcctccctcagcctcctgagtagctgggattacaggtgtctgccaccatgcctggctaatttttttgtatttttagtaaagatggggttcaccttgttggccaggctggttttgaactcctgacctcaagagatccccgccttggcctcctaaagtgctacgattacatgtgtgagccaccgcccccggccaagatcaactttttaatttagttatttttttttttttttttttgagacaggtgctctgttgcccaagctggagtgcagtggtgtgatcttggttcattgcagcctccacctcccatgctcatatgtttcttccacctcagtgtcctgagtagctgagaccatagacccatgccaccatacctggcttttgtttttttggtagagatggttctccctgtgttgcccaggttggtcccaaactcctgggctgaagcagtcctccttccttggtctcccaaaaagtgctgggattacaggcatgagccaccacagccagccagatcaacttttttagcttccatgtacaagtgagaacatgctgtatttatctttctgtacctaacttatttcacttcacataacgtcctccagggtcattcatgttgcctgaatagtattcaattgtgtgtatagaccacgttttctttacctgttcatcagttgctggacacttagattgattccaatattttgtctattgtgaataaggccgcagtgaacatgggaacgcagatatttcgttgatgtgctgatttcttttccattgggtgtatatgcagcagtggggttgctggatgtatgattgttctgctttttttaatttttttttaattttttttgagagagtctcaccctgtcacccaggctggagtgcagtagcacgatcttagctcactgcaaagtccacctcctgggttcaaacaattcttgtgcctcagcctcccaagtagctgggagtacaggtatgtgctaccatacctggctaatttttgtatttttagtagagacaggtttaccatgttggccaggctggtctcgaactcctggcctcaggtgatccacccgcctctgcctcctaaagtgctagaattacaggctttttattttttgaagaaacttcattctgttttctataattgctgtactaatttgcattcccaccaggggtgcacaagaagagttctcctttctccacatcctcaccagcatctgttattttttgtctttttggtaacagctattctaactggggtgagatgacatcacagtgtggttttgatttgcgtttttcttatgaataatgatgttgaacatattttcatatgtttcttggccatttgtatgtcttcttttgagaactctctatttagatcattttctcatttttaaattggattatttggtttttgtctgttgcgtttcttatatatcgtatattttactcccttggtggatgaatagtttgcacatattttctcccattctgtagttgtcgcttcacttttttcattgcttctgttgctgtgcagaagcttttagtctgatataattttatttgtctatttttgcttttgttgcatgagttctcagccataaaatctttgcccagaccaatgtcgggaagcctttttcctgtgtttgtttgtagtagtttcagagttttggccttacatttaagtctttaatccattagagatgatttttatatatggagagacataggggtctacttccactctgctgcccatggttacactgtttcctcagtggtgtttgttgaagagactgtatgtatgttctttttgcctttgttgaaaatcagttggctacatgtatgtggatttatttctgttcttttggtccatgtgtctgtttttatgtcactcccatgctgatgctgttttggttactgtagctttgttttttgtttctgtttttgtttttttgtttgtttttgtttttagtagacggagcctcactctgccacccaggctgcccaggctggagtgaagtggcgccatctcggctcactgcaatttccgcctcccaggttcaggccattctcctgcctcagcctcccaagtagctgggactacaggcacccgccacaacgcctggctaagttttttttgtatttttagtagagacgtggtttcactgtgttagccaggatggtcttgatctcctgaccttgtgatccacccgtcttggcctcccgaagtgctgggattacaggcatgagccaccgtgcccggcctgctttgcgttttttaaagtcaggtagtgggatgcctctagcttcgtttattttgtttagtgtcactttggctatttgaggtcttttgtggtttcatataaattttaggattttttttccatttctgtgaagaatgtccttggtgtctagataaggatgcattcgatctgtagatcactttgggcaataggaaatgtacttaatttttatttagaaagttaagcaaaaatatcaaccagtattaaaaatgttttaaatatgtgttagacatttagacatctttaaaatcttttaaatatatgtagacatttatatttaaaacatttaaaaatacatgtctatgtttagttatgtttatgcctgcatgatttaaagaaagaaatgatctgggtccaatgagataacttgttaataaactgtttatcattcataatcagccttgttaccctagaataggacacttattttaatgtctgacttggtttcttttaaatttatggcttttatttctttttttcccttaatcttctgactactcattgttagagaacttcttgatattttcaattagtttccagagcttctgctctggttagctgtttttttagcgccaactctgaaataatttcccaggttcctggtccttcctctgagagatttagtccttcatcccatgtagcggagcaaaaggagagaggtcattggcctcacattacttttctatgttggttgacttaatattattacttttcccaagaaggaatacatttttacagtaggaaaactttttttttcttttcttgaatttagctgtttgcctttgaaagctagatcaagcatacaaacacatgtatgtatgagtatacatgttctcatgtttccctgtttataaacttttcctataaggatagcctaggtagtacattcttaatgtttgctatagttttatatcttgaataagttagttcaggaaaagatttgctgacaatagatgataaattcgtagcttgtgatgcaacatcattttaaaaagcaagtttaaaaattaaagttattagaaaaagatgcaaaatggtttctccacattcaccctagttggtttctcccataaactgagaatcttggaagctgatctccggagaatgtggacgagaaaactatgttttaaaccttttttttattctacaggaaatgaatttgtttgccctttttcctgtggtgccattgtgtctgaattttctttctgttcttataataggcagaatgaataagaaagccacacatttgcgaatcctctggatgctgtgtggggctatgctgtgaggttgaataattatgattaattgtaagctggaccatgtgcatttcagagagtgggtagtaattaagtaagagttaatgattttaccattgggctactggtatgtatttatgatacatagctctattattcctacaagatatacttcgtaattgcacagatgttgttgaactccaatttcaagccataaaagtgttttggggctgctttctttttatatatctttgtaattcactagcaagccctaagaaaggtgatactaaaagctgaatcaaaaagaaagcaggtggtcagtgtgtgtgtatgtgcacacaggttaatcaggaggggaatttgcttttttgatttgttgttcactttgctatgttttaaatgtatttttataaaagtgcaaagatacacttattttaatgctttaaaataacttgaaatgattgagcaatcgtaggctagttctgagcatgcctttaaattcaggaaaaaagggttactttgtatgttggactttaggtagaaatatttattaatatttgtactgtttgtagctttggttgatttatggtcacctatgtaggtttaggttttgtacactgtggataattatatatgttaactttttaaaagattaatttttattgaagatacagagaaacagtaactagcattatttatttgattggctgttcaacttactttatcacctcttcagctgttttccagtccacaattgctcaattatttcacaggcaagtaagttataccttcatattttcccaaaatgagaataatgatatccatcttgcagcattgctatgatgactagcaacagtggtttttattcattgtgtctggtactatataccagcattaagaagctttctgcagccattagctcataaaacctcactatagccctctagggtaagaattgttgccccagttttccagataaggaaattaatcatcaaggttcacatggctttgccaaagttgggtgaaattcctaaggagctgagctaggactgtgcatgtagagcaccagacattgtgcctctcacacgattgtcatcttacacgtccatatcgatcctttggaaaaagtaggtaaagagctactttttattttttctttttcctaagtgttttttaaccttccgttgtattaggctttaaaaacaaaatggttgtcctcttcctaaagaataatttctctctgatagggaaaatgtgtgtatatttcaatattttggtggtatatttggaataggatttgttaaaattgtttttaattattattatttttcatattaaacacagctttcaaacacttaggcataaacatacaattaaatacacacatttctagcctatggttatgtttctgtataggttatatactgcatgaacagatgcatactacatttcagtgtctttattagaaatgtatcacagctgggcacggtggctcacgcctgtaatccgagcactttgggaggccgaggcgggcggatcacgaggtgaggggatcgagaccatcctggctaacacggtgaaaccccgtctctactaaaaatacaaaaaatcagctgggcgtggtggcgggtgcctgtagtcccagctactcggggcgggggggtagggggggcgctgaggcaggggaatggtgtgaacctgggaggcggagcttgcagtgaaccgagattgcgccactgcactccagcctgggcgacagagcaagactccgcctcaaaaaaaaaaaaaaaaaaaagaaagaaatgtatcacatttatttcccatcttcatgtacgtggatgaaaataaattcagcagtttttagctctctcccgtccccatttcattatggaaaattgcgtacggggccttaggagtcaacaggatttttgtggttggttcaagatccagattttttcctagacagcctataattgtattccgatttgccttatgagaagtctagaaggaagggattctaaaatagtattaatcttgtgatttgtcaagttaatttttctggtcatatttgaaattaaatttaaaaggcatcagaaaatcccgaaattactcctgcatgtgtcttttccttgccttccttggtgtatgctctgcgttccttttgatggtttggttttgatctgttctgccttccagttcggatagtacatggttaggtaatgcctaaccaagggttagtaaactaagtcagctaaaatgtttctaaaatgtcatactaaaggtacaaagttgtgatggaaaacatttatttatatgtatgttaccttatgttgtagaagtagctagtaaacagagaatacctttgaaagctataattaattttaccagccatcacagttttcctttatccgagcactgaagcattaatacatgtaagaataaactggcccttattctgcctcactcaaggtgcatgattttcatctatttttgggactgagtttggaatgcatcgttaacatagaccggtttcaactctgctaaactgttcaaagactagaatattttcagcaactaggtattttttaaaaaggaaaagaaagcaacttactttttctgtcattgcatgaatgtatttccctgggagctgcttactttctaaaatcattaagagctgaaaatttcaaactcccccccacctctccccatcaccacacaccaccctttacagacataaataggtcttgtatattttcagtaatcaaaagctgtgggtacttctaattgttctattgcatatcaaactttataaaacttagagtatacctactagttaatcatacatacacaatgtttagcagtttaattttgctcagaaacaataaagattataaactgaaataaaacaaaatgctgtcagcaaccacattatatatatatttcaaaaaaggaaactcctaatctgtctagcgtattctaggaactccatatttcacccacgatcatactggctcctgagaattttcctcacactgattcttggttacaggcatgcttatttttccttctttgattaactcaggtccacacgtaaccctttttgggttactgggtcatcttcctaactgctctaagcctagatttctgtttaatattagagtattctgttcccataatgtccgaccaattcttgatgagtactggcatttttaaattttttaaacagtgacagaatgtagtgacagtttttctttgtatgtatcagagcatttcttatgataatagctgtatcggtggcctcctaatcaagagcattcagcaactttcacgttccctggatggtttgctaggtacctggattattgattggaacttcaggagagtttaatgactctcatccttcttgccacatgccctagccgatatatttaatattacttccagtcgttgccaatagaatgcactttaaatagtgtaggaatatactaccagagattagagtagatgtggatgaatctatcatgaataaccagagcttcaataaaaggcccctttggtataaaattctgaactttgaaacagttggcctccgcctaagttttggtatatttccactagctagaaatttcactactcttaataaaaataattctgcagaaggtttcccagcctttctgacggtaatgtcaaatgatttttctcgtctcatagtttattgcctagcactttgtaacattctgctaatttctgctggttttaaaaacacgatcaagagagtgaagtaagaggctgggcgcactttgggaggttgaagtgggagaattgcttgaggccaggagtttgagaccagcctgcacaacaggttttttgttttgtctcgacaaaacaaaagataaaaataacaggacatggtggctagatagccctagctactatggaggctgagacgggaggatcactggagtccaggagttcaggaatacagcgagctatgattgtgcccctgcactccagtctgggtgacaaagggagaccttgtctctaaacaaacaaaaagagggaagtaagtactcaagacctcgatctcttcttacgctccttaaccaactggctctgtatctcaggagtgtggtatacttctaagagcaggtttcagtatccacacagtcttgacagtattgagattggtggtgtttgccttgcattgtttgaaatttccatttttacaaaacctgccctacagactttctcatgctaaattattggagcttatatttatctactggtgataattttggcctgcttttgacagaggaatcttattttaatgttgtgtgaatattaattaattttagactcataattaattgacaaaaataactgagttgaaaatgtacctggggattctaaattttaaatagaattgttagttttaaagatgtctatgccattgctttagaggaaatactgacttgagtccaaaattagtcgaattatgaatgacttattcattcctggaatcttaggattgtaaagattttttaaatgttctgggccttttgatgcatctgttaacaggggttatctagtcagttgagagaaaatctgaagatgcccaaggtcctcatattggttggtgcagtatttgcgtatcacctatttctactctcctgtagactgtagatgatctctagattacttgtaatacctaatacaatataaatgctatgtaaattgttgctataccctgttagttttaaaaatttgtaggctgggtgcggtggctcatgcctgtaatcctagcactttgggaggccaaggcgggtggatcacctgaggtcaggagttcgagaccagcttggccaacatggagaaagcccatctctactaaaaatacaaaattaggcgagcgtggtggcaggcacctgtaatcccagctactcgggaggctgaagcaggagaactgcttgaacctgggaggtggaggttgcagtgagccaagatcgggccattgcactccagcctgggtgacagagtgagattccgtctcaaaaaaaaaaaaaaaaaagtattcttttttactgtattcttttgttctgaatattttcaatctgagattggttgaattcatagatgcagaatgcatggatacagagagctgattgtggtggtgcctaagaactagatggctctaggaaggttttttgtcctttttaaatatatgtaatggagaatacaatgatttccatctttcccaacgtttgtattatctcttacgctatatacgttgtcaagaatctatgggtgcgggtagtaattgtggaagagcgaggcagaaatcatggagaaacggttgtgggtggctgtcagtctattttaattctagtatgttttaccagcatggaattcagaagaactgaaatcccctgctctgatggctgcagcatcctgtgctgggaccgtgcagcattgagaggcttgacacatgtcagtatgtggaagagtttggagagcagccagcaagaggagtgagcccctaagaacaaacaagactcttcctcaggattactcagggctggctgcatgatttgcaggacacagtgcagaatgaaagtgcagggcactttgttcaaaaattaagaatttcaagacattgacaacagagcttcaaaataaataaataaatacataaatgggagatctgtgctgatgccagggtgggtggtatccacaaagcctgctctgatctgatgttaggtgaaagaaaagcacctaaatgtttctcacaaagctttggttcttaattctaatatgagacaacagaatggcgtgggagttgacttagccctaaacattctagatctttaaagttttcgttggtccttccacagactgcagactgagctcacaggagtgtgtccatgatgcaaacagaagtatcttataggtgccaaaggatggacttaccttttcctgccttttaccaacatatttgcaacagaaaaaggatcatgtgaacagatatcacctagggtagctgtcatttggaatttgtgtaattattagaatttgtacaaaacacagaatatccctttttttaaatccattcattctacatttgcactcttttccctcccactatcccaggaagttacttaattattcagtggctcttctagctgttatgcattaagaattcctattgttggcacaaaatccatcatttaagcctcatcttgaggaggttgtcatcttcttatttctgatatgtctgtgaaatactgcattttttagcatatttgtgtgtaccctggagggttgtttgcaaatacatattgcctgtgttgtgcatttatctgtaaaatgccggaatttcttacacttttaatgggtcttgagtaatgactttgtgggtgggatagggtgaagctctgtcagtttcgaaatctgtaaggtgaagaaaacttggtactagttttccaggaacttagatgggcccccaaagattaagatttgtgctgaaacacatttctcaacgtggcctctcatcttatgcatctatctacaaatctggacagctacttacatgctcatgctccagctgtgtttggctgtctttttttttttttttttttttaagacagagtctctctctgtcaccaggctggagtgcagtggtgtgatctcggctcactacagcctccacctcctgggttcaagcgattctcctgcctcagcttcctgagtagctgggactacaggcgtgcaccaccatgcccagctaatttttgtatttttagtagagatggggtttcacaatgttggcaggatggtctcgatctcttgaccttgtgatctgcccgccttggcctcccaaagtgctgggattacaggcgtgagccaccatgcccagccagagctgtcttattgatagacagacttttttttttttttttttttttttgaagacacgggggtctcactatgttgcccaggctggtcttgaactcctggcctcaagtgatcctcctgcctcagcctcccaaaaggctggaattataagcatgagccactatgccaggctgatgctccaacttttataaaaatgtagcttctttattttccaagtcccagaaaaaaccaaccaaccaaaagaaatctttgaaaatcatgctccacagcatgcagatttgaggaggggaactggatccggcaggcatgatttttccacttgcctccagcctcatctttctcctcctctgggtgactctgcctgagtttgtggtgcctatactgcctttctctgcacccggagcacgtgactgtacacacctgcacacatctgtagacatacgctgttttagtcagggttctattaaagggacagaactacacacacacacacacacacacacacacacacacacacacacacacacacacacatttccctttatatatgtatagtaatatagatatatgtagttctgtatatatataaagaactaataggatatatctatataaaggggagtttttcctcatatatatatatagaagatatatatatataggagatatagatataggagatatatatatataggagatatatatatataggagatatagatataggagatatatatatataggagatatatatatataggagatatatatataggagatatatatataggagatatatatataggagatatatatataggagatatatatataggagatatatatatataggagatatatatatataggagatatatatataggagatatatatataggagatatatatataggagatatatatatatataggagatatatatatatataggagatatatatataggagatatatatatataggagatatatatatataggagatatatatatataggagatatatatataggagatatatatatataggagatatatatatataggagatatatatataggagatatatatatataggagatatatataggagatatatatatatataggagatatatatatatatatataggagatatatataggagatatatatatatatttaagagtatttttggcagggcacagtggctcacgcctgtaatcccagcactttgggaggccgaggtgggcggatcatgaggtcaggagatcgagaccatcctggctaacatgatgaaaccccgtgtctactaaaagtacaaaaaattagccaggcgtggtggtaggcgccctgtagtcccagctactcgggaggctgaggcaggagaatggcgtgaaccccggaggtggagcttgcagtgagctgagattgcaccactgcactccagcctgggtgacagagccagactccgtctcaaaaaaaaaaaaaaaaaaaaaaaaaaaaaatttcattttggggctgtttcagatcagtggcatacctagtgtagttgacatccggcatggattatttttacaccaccctagtgtacaacaaaattattttcattaataattagagcaggaaacatataataataatcaccagaagagaaactcagtgaaagttttcccttagtgaatctacaatttttaattctatcagttaaaaataaatattactgtacaaagaaggaaaaaagaaatggactaataggttttagtaacattgagattttttttgaaaagtgaaaaatgtaaacttatatattgatctgtccagtaatgagtaatagcattgcagtttctcttttgagtcttctgcaaatttatcagtgactttgtcagaatttatctctgccgtatattcgcattcagtagacggtatagcgagatttgtcaatatctttgttgcttatagttcaataaagtacacttttattttttataattttaatcttgaaaatatatatgtaatatagaactaataggatctctatatattttatatatcatatacatctttatgtatcatatatatctttatatatattttatatatctttatatatatataaataaaggagagtttattaaatattaacttacacgatcacaaagtcccataataggccatctgcaagctgaggagcaaggagagccagagtcccaaaacggaagatcttggagtctgatatttgaggggaggaagcatccagcatgggagaaagatgtgggctgggaggctaggcctgtctctccttttcatgtttttctgcctgctttaaatttgttggaagctgactacatttcgcccaccatattaagagtggatctgccttccccagctcagagtcaaatgtttatctcttttggcaacacccacacagacacacccagggttcatacttcgcatccctcaatccaatcaagttgacacttggtattaaccatctcatacccagtttccttctcctccgaaaactgggaagactaacaagaaattagttgtacttgttgactgatgggttgcagtttgtttcactcggacatttgcccttgcttttggtccctgttttgtggcctgaggggatttactcacttcttaagaggattttaaggtagcaggttttggggggaaaactggatggtttttaaatttcttgttcctggacgcacctgggactgaagacacctttgaccgtcaccgccttactccaggatctggttatggagggattggctgcgtgtcggacagttttctctgtgtactgtgcccttggttgctgtctgtcattgagctcagggcagtggcctaaaccaacttactgcctgcccatctttttctttttgctgtgagtaccacatgcaaatttaatgttttctggtacagtttttctgttttcattctgtgctcattttctgcctcctctgatccttctactccctgtctaatatgttgggatgaatattatggcctcacgtactattacttgcctctggttctaaagatcatggcaaagaaatgagtcgtttggagttcctaatcaaggttctagtctgcatattgaactctgattgacttggaaacccctttgcccaaacaaaagatgaaatgttccatcctgaattcagcatctcttgttcaatgtgttccgtgactgtttgtcttcctcttcacattattttggaacaaattaggcagaagagacaatctttgcagattgaatttaggcaagttaataatgtcattgggcaaagaacattaacccctggggctcttggaatgtatcaagtcttctgtgccaagggcagatgccatcagggacagagatgagctcttaagggacacaaggacacaacttaacaccagagctgcggagcaccaggcaggtggttctgatttaaacttgcagcccaccaaggcactattgcttcattctgggacattttgacaacctgtcagccaggggtaattttctaagcaccacatttatttttctggtatactccctcatgtctgttaattttgacagctgtccactgctccaggacttgactgtactttcttctttcccttaatcgctctctaccaaactatcactccaaaggatagaacataattacattttgaaatttcaaaaccacagcactattatgtgtcaactattgttaactatctataataacttttaagtactaatgatgttacatacacatttgacattttttggacctcagttttgctttctgttaattgtgtgcctacgtgggcagtagaggcctttaaaaaaaattcaagaggatatatagtgaaggcttgagaagtttttacatgtctatgaacctatgtaactttcacgcacatgaagatacagaacactttctgtatccagaaggctcgcctgtggccttcccagtcaatatcctgcccgatgttcacaccatagattatacatatgtacattatacattctctcattgctggctgcttttctcatattacatctgtgagattcatctgtgttgttgagtgtaacagtagtccatcttgtgcagtattttgtcgtatgatttttccacaattttcttttttactccattctagtgctgatggacatttaagagtattttcattttggggctgtttcttatcagtggcatacctagtgtagttgacatccagcatggattatttttacaccaccctagtatacaacaaattttgtattttcattcataattagagcaggaaacatataataataatcaccagaagagaaattcagtgaaagttttccattagtggatctacaatatttaattctatcagttaaaaataaatattaagaaggaaaaaaagaaatggactaatagtttttagtaacattgaaattttttttgaaaagtgaaaagtgtaaacatatattgatctgtccagtaatgaataacagcgttgcagtttctcttttgagtcttctgcaaatttatcagcgactttctcagaatttatctctgccatatattcgtgttcagtaagacagtagagtgagatttgtcaatatctttgttgcttatagttcgacaaagtacacttcttttttttataattttaatcttgaaaaatttctttcacataaaggaacaatctctatacaagtaattaggaaacgtcttacagataaaagataattttgcctgagtttcataaacatctcatttcacagtaaattccaggaattgcaattttttcccgcttctggggattaaactagtgagtttcaaatgatgtctccatagctgaaaattttaagcacacataaaaagtccaagggcccatgtagaatgacagaatggaaataagttgtatttctttatcattgcaataaactttgctatcattttttaatgatatttaatgaatttcaaatgtagtcggaaactgaaggattccatagtgccacagggattggagaaacaagctgtgcttagggcaagcttgaatggttctcaactcttaggagcttacctgaaatgaatctgtgactcgatacctgtggggtgggccgctctataatgagttttctgaattaacttccatgtgaaaaataatgttcactaaagcataaataactagttacatttgtgtcatgtaacctaatatgctaatttgaattttatttacttatttattcatgaatgaatgaacgacgggttctcactttgtcatccaaggtagagtgcagtggcgcacttatagctcactgcagccttgaactcctggactcaagatcctcctgccttagccttttgagtagctgggaccacaggcccctgccactatacttggtgctaatttttgcttttttttttttttttctttgtagagataagagtcttgctgtgttgcccaggctggtctcaaactcctggccctcaggcgtgatccttctcctgcctttgcctcccaaagcattaggattacaagggtgagccgctgtgcctggccttgaattttaaattgaaattaaaatttaggcttggcacaatggctcacgcctgtaatgcgtgcactttgggagaccgatgcaggaggattgcttgagttcaggagtttgagactagcctgggcaacaatagtgagaccccatttctacaaaaaaaaaaaaaaaaaaaaaaaaaaaattaaaaaaatgggcgggcatggtggcacgtgcttgtggtctcagctgcttgggaggctgaggtgggaattatcacttgagcttgagaggtcaagcctgcagtaagccgtgatggtgccactgcactccagcctgagcaacagagcaagaatctgtctcaaaatattaaaacaaaaacaaaacttgatggtagccctaccaagtatttagaacttacatgaataaaatgatactgtttggggaggagtctttcatctgtgacattgtttgaaattgctagtatgtggtgatcataaaaacaagactaattttcagactaattgttttcagattttcagtctgttccttagtgcctgtatctgggtcagtcagtccccttacctccctttccttggcttaaggtcctgctctgaacatgtccctttcaatattcatgtacagatattctggtggacacatggatgctgttttttcacatcctccctaacactggatattactgattttttttttcatttcagacattctgcatgtgttccataaataacaacaatattcctcttcctttccaatctttataccttttattttaattaattaatggatttatttatttttgagaccggggtctcgctctgtcgcccaggctggagtgcagtggtacaatcttggctcactgcaaccaccatctcccagactcaggcgatccttcaccttaacctcctgagtagctaggactaccggctggtgacaccacgtttggttaattttttttttttttttgtatttttgatagagacagagttttaccatgttgcccaggctggtctcgaactcctgagctcaagccatccacctgcctcggcctcccaaagtgctgggattatagccatgagccactgagcctggcccttttatttcttttttatttcttgttccgctgggtaggatctcatcacagtgtcaaatatggtgacagtagcatgtctctctttgtcttgttcatgagcctagaggaaaggttccagtttgacaaatgtaggcttctttgtagataccatttatcagattaaagaagttccaagaaggccttttattaaaaggaaaatttagttatgccatagtaaatttaaaacatggctttaatatgatttcatgaacatgttgtagtggaaagaaagggcattgctgtcttgtagacctcaggttgaatgtgggtcttactgtctgtgatctggacttctgaacctgcagagtaaccaagtaagcccacataaggtcattcgaattatgaaagtaaaatgagagaatctcttcagttgttggctatttttttcctgacattaatttgaatgaggtcataaagtaaaattttaaagttgaattttatgtagacttggttcattcaaatacttgaagataacaacattcctagtctgagttgtctcttaagaaagatttagtaggggttatgtttctcagttccatgccggcagtctgaattctaattataaatgcctgttctgtcataatcttccaatgagtggaattgaactgttcatatacattttattgatttatgtctgtatttaaagctgagtgatttaatcattttggacggtggagagagccgtggaatcgggtctggctgaagtgagggttagctatcatttgtttaaccctcatgtgtctggtgctgagtaagatgagttttagagtttatgaagggattaggtgacagcgatgaaaattccaagccatacttacgctaagagttatgatggagtcatcttcggaatgtgctgatgacggaagtggggatgcggttgcttgtgggttttgttttgtttgggggagtgtggggagagacgggtgatggttgtagagaatggggaacgctttcaggcatgacccttgtgttgattgggtcagtttagctgcaggggaaggcgcagggatattcctggtgttgggagaggtatccacactggcagaggctggggcagggttctgtgtgtgcagttctggaccatcaagggcagggtgggtaggggctggactctggaaggccatccttcatggtgctgaggggcttgggctttcagtcttgggaatgctttgccaagatatgccgaatctgagtgttcagatctgtaactgcaggtctatggcagtagcattgtctcctgtgttagaggctctttataactctttactgctggtacccccaggacttactgatggctcttgaacccctgcccttgttttccccagttttcaaatgtatttggtaatggggtgcaaccccatttactaatgaagtcctggtttaaaatgaagcatgcgtaataatagttcagcttaataaatgttttggaaaaagagccttgtttacagacattcactcttccctcgatttaaaaaaatattttttttcattctcatattgtcaagagagtgctctgaaaagttacagtgtaacagtaattgaatattctatttatttttgcctttgaatactaagatatataagtcaagggtggactattccttgtcataaagctgaaagtttaatttcaaactgacatctgctgccagttctgtgtttcagtattttatttatatttaaaattccaccttccctatatttgtaatatcatttttttgtggtaattgtgtctttgtgttcttcctttcagtaggtgttatttattaggctcacttttattctgcgggcaacttcagagatcccttgttcctcagaacatgctagaattccttctcttcttcagtgtcctaagtagatgatatgaatgtgcataattaactacgttctgcagttctcagctcaggaatacttttcagctcttacagatagacacttaggcgtaacagttgttacttatgagctcattttaaaagtagataaatgtctgaattttcaaagacaaagggtttcagagttcttgatagtttcttatagaggtgggtttagagcctgtgagaaagccactacttcagaatcttaacaaatagtaattgacacccagtggcaaaaatcagaatccgcttttctttcaacagcagatatttaaggcttaattgctgactgaaagtgcagttcgccctcctgcttctggagacagtgatgcccccagcccagctcactggacaatcagccagggtcaaggtgtggtccccatacccagagacgtcatcttctcctcttccgatctccacgtgtaccccagcttaccccagcttcatcttccctatgcacagaaaattaggataattctaagaattgtttttcttggaaacaatgttttcaatatggcaaagtgaaaattgtttttctaaacaagatattggctggatgtggtggcttacgcctgtggtcccagctacttgggaggctgagatgggaggatcacttgagcccaggagttggagggtgcagcgagctgttattgtgatactcctactccagcctgggtgacacagtgagaccttgtctcaaaaataataataatagtaaataaataaaaatttaaaaagttaaaaaagtaagatgttgatgccagcaaaacttattggtgatgattgaaagccaaaaatatattataaaacacacaagcagtatatcaatattatattatatataaatataaacaaaaacaaaaaaaagcgctaaaattatactaaaggaggaggtgcagttatgcttcttgtaggtcaggtgctctgagcagcagctgccatgccggtcctgccatcaccacaaatccaaggcgactgacaacaccaaacccttcccaactgttcttaactctagtatattcttgctaatgcctttcagtactaatgttttccctgctccagcgtaacacccagaatcttttccttgaccattctgataggagcctagaaccttctgtagttttcagtgtttctttggtgaggcaaattcttggaatatctttggcacgggggtgtaaaatttccactcgctatatttaagtctacagctgggagcaatttcttattgatgtacctaaaactagttaaatccccactctccttagcagtccctcttgagagttatttaagatttaggtaatatattacaaattgtgagtgcaaatctctgccactctctgagattgctgcactaaggaatcactagccctgcccttccctgtctcatcctcccagcgcctggaattggattagcacctgtggtgtgtgttggcattttctgcagggctgatatggtctggctctatgtccccacccatatctcatcttgagttgaaatccaaattgtcatccccgtgtgttggggaagggaactcgtggagggtgatgagatcatgagagaagttcccctatgctgttcttgtgatagtgtgtgagttcttgcgagatctggtggttttataaggggctttccccactttgctctgcactaattctctctggtgctatcttgtgaagaggtgccttccgccatgattgtaagcttgctgagtcctccctagccgtgtggaattgtgagtcgattaaacctcttttctttataagttacccagtctcaggtatttcttcataacagtgtgagatcagactaatacaagggctttaaacatttgtgtgtttgtgatagaaggaaattccatatgcaggtatggtcaactaagtgagtacatttccttaaaaaaaaaaaagtaaaaatttggatttgatggatattgcttacaaacttgagtgctcccaaagttatttccacaggcatgctgaatctcatctgatctgtagtgactctcacatttaacttgaattagagcttgggcacaaaagcaataatttgaacaaagtttgattcttaaagagtaatatggtatccacttccccacttccattgtttttcaagaaaaagttggtatgcaatacaagggtaatattaagcttttatcttcatcatttatttatttatttttataaagacagggtctcacaatgttggggaggctggtctcgaactcctaggcttaagcaatcctcccacgttggcctcccaaagtgctgggattacaggtgtgagtcactgcacctggcttcatttattcagtatttgaggcagaataggaaaaaagaaaaccaaggaaattctaatgtataaactgtgacagagtgtttttttttaacctaaataatgaattccttatatttgaaataactaagtgaaaataaaattttattttgtgtctgtttcaatgtaaaagcttatttcattccactacagcatacagaaactttattctttttcctagaaggttatagtaccagacacccttcttccttgaaatagtttagatgggactgactgaaaagaatcactgtaattggcatgtagagtgtcactgggtactcgttaggataagaaaatgtagtgaaatcaacttgaaatttaaccaaattgatggcattgtgccttgtaaggtgctttatggaatgtagtcacattttatagtagacttaagttctagttttaagtaaattttttttatttttacattttcaaatgacttttaacaaatactctgaatgaatactcagtaaatacttaggccattaatattttgcaatggaaatttctattgtagtttcagttcatgaatctttgctccttaccccatcccacaagaaagacttaaacattcaatgagaggcaaatttgacttcttcaaagccggaatggaagaagggagacagaatgtcacaaactgtagtctgaacttgacattgtgatattcttagagaatgtttttacttttaagccttaaaaagtattcatgttcttgaactgtggaactccagtctcaagtttggttgtttggcaagtaaattaagactaatcattataacagtcctttgctacatgtctactgtagctgagctctgtcctgtgtgttttagacattaccgtatttagaaagagaatgactccaaggtgctacatggagaaactaaagagagtcacatggccaagatgtaccacactggagatgccaaaacttggttaaaagccctcatctgactgactttatttatttttattttattttatttttttgagacagggtctcacacttttgcccagcctggagtgcagtggtatgatgtttgctatagccttgagctctctgggcacaagtgatcctctcacctcaccctctcaagtagctgagactacgggcatgagccatcatacctggctaatttttgtatattttgtagagttgaggtctcaccatgttgcacaggctggttgacttattttgaagccgattttctttttgtcgtcctcctctaccttcaggacttttcaggtagtataatcctgtcgtcgtaattcctggcatcacttactccattcttgaggttttctggtctcttgcatagccaggtgagagctgagttgaaaagctttttatacaggcttcatggatatgtatactggtataagtgcatcacacagttaataaaaatattggagaagaccatttagttcacttctttataacagcagtgcctgtacacactttcctcaagactttctggtagttggaaatatgagtttaaaagtaatagtcattaaattaagtggaaactgtgggtcatttcaaagacattgtttttacaaattgattatacacatactaggtccttccaagagcatgcttaggttgaacagaaagtcttactaacaaaacacgtgccctgtgctctgtattgtcctcagggcatatgattgactattacagtaataaacccttgctttctctgaggtgcaaaaagaagctatagtctgagtgcttgggagaggcataagtcataattgtaggctgtaataaatgcaaatctatgaaaaatgggttagcttcaaacagctgagtcgcagagtcttgcaaaaccatgccccattattcctctctggagcccagatcatagaagaattatccatcttttttaacagtgggatttctaaggcttctcagaaatctccggtctcttggtttccagcaagagaacaatatcgagtcttaaatgacagaaatgaattcctaaataagttgaactttttcaagtttttaccaaatttaaataataatgctcatatgaatggtagctcatgtcttccctgtgcaggtggtactgaactaacattctaaatttgaaatggcaggctctctgttcccctgtctgggtaatctctgataaaacattaatcatctcaaggttctattcaagtccattgatggaaattgtgaaatgtaatttagcttgaggaattgaattaatgttttctaatagccctgagatattcactgatttataggtttgaatgctgggaggtgcatttgtgtttctctgtgtgtgcgtgagctcatcctagttaatctaaataggtgtttagaaatgatgcacattctatatcataaaaatatgtattatctctgtgactggtgaatattggtatggtttatttgtgtctgtcatggaacttatacattgctttatacacctggtataaattcgtgctcaactgagaaatatttgttgaattttaaaaatcctttaaatgtatatgcatatatatgtagacatggaatcacagatgtatatatttagttctaatgttttattttcaagcaggtgcagaatttatctgatttgattacttacactatgtgcctctgttgtgcaaatactagttttctcatcctttgtttttctccttacagctcctttatcactttgcaatatctagctctgctctgtaacatttctgcctcaaacccacattgatggcgtacttgtgtctttctcactaccctcttcctttacaatgttacagcttaacaatgggtgcagcatccatttgtctttcatttcattcccttctgcatgtgtagcgtctgagaagtttctggcccaggtaggcatgcagtaatgtattgaatgaatatggtaagggaagaaggaaaaaacatggttccaagatcctggggaggtctagttgaatggactgtgccttttttgtgtcaccttggagcagtcatttcatctcttgaggcttggtttcttctctgtgaaatatgcatgattattattatatagtttttgagacagagtattgctctgttgcccaggctggaatgcagtggtgtgatctccactcactgcaacctccaactccgggttcaagcaattctcctgccttagcctctggagtagctgggactacaggtgtgtgccaccacgctcggctaatttttgtatttttagtagagacagggtttcaccatgttggccaggctgatctcaaactcctgacctctggtgatctgtctgccttggcctcccacagtgctgggattagaggtgtgagccaccatgcccagcccagtcctctttttgatggcagtgttctgtatggggtgctctatggagccttccaatagaatgctaataggatagaatgcattctaatattacattctaggagaagggaaatgtcagttattcagtccatgtcctcacctgtgcctttgtatcaattaccattcacagaggaaaaaaattagtgtcccaggtgatttaaagtagggaggtttcacctgttctcatagaatttattacatcagtatgtgttacaggcaagttccaagtgttacgaacaaatattgtgacataattcactgggagttgtgtatcatgagtccagaaaagaaagttgtgcctatgttgtggaggcttgaattaaggataaataattaaagttgatggttagttaggagcgcctaaagtttgggtctgtgtcaggactgaaggtttaggaaagaaattttggaatctagaagtgaagaactttggaatggtggcgtttactggagtgtgttctaaatccctgtctgtgtttcaagtcgttgctaatctcccttgtggctttctgctgttaccatccatcgtaccttaggcctgcagctgcatagaggacagggcgtgataatcatgattgtgttggctcatcccagaagctggcatgtttaggttttaagtgtagtaacaatgagtacagaaactcctaaccttgatcgaaactcccccggcttagcttgcaccagttgtaccatacccaccaacacaatggtcatacggagtttctttttgctccttgagaccagcgacttcatttctggattaaggccttgcattctgtttccccactgggaattctcgtcccctgattttaggtgggctcctctttatcttgggtttgtcttcagtcttgatgctcagaaaagtctcccctgatcgacaagtcatgctccatcacatcctcctattttaattcttactttactatatgatattaccttattagtgtaatgtgagctcatgtgagtaaggtctttgtctggctcactgctgtagccagtgtttagaatgttcgacatgtggtagaaactcagatgttggttgaatgagagaatgaatgggtaaagacaccttggcctcatttcctgtatctgttttccttacccagccccacttaaatgtaatagaaaaacagaaagaccatatttactaattataaacacttactgagagctgggtaatggagaccctttgtttgggcacacacagagataaagtaagatttatttattattggcaagcaggtccaggctcacaaattggtattccattaccagaggtggatgaacgatgtggagtgggatggggagggggtgatggggggtctgggaacaagctggtcttcgtgactgggactggggccctctgggttgggacagaatggtgtgcaggtgtgttttcccctgttacttcccgccctgtttcctggtagtcctgccattgcagacctgtatctgtgccagaaggaggcatttcaaggtgtcaatggggttggtagtggctgaggaaggaaaggcgggggagttaataaatggccatagtaaggacagagagagattttttccagcatttgggtgctttgcctccagtgcctgtctcatgcagctgcttgtggacacagcgtttatgaggtttctcttgtgcattttaaagaatcaggatttccatagaagtcctaaaagacaaatctagactctgggtgtgcccacttccagttcttcttttaggaaccatttcaggaaggattctttatacaccaggaaggatgccctaagtgtgatcattgttggacagggatccttagctgacagcgagaagagagtggcaaggcacctttgaacgtgacctctcctttggctaacacaaaaatcaaaagctggtgtttcccttgctgttctttagctgaatttccaaccactctgcccactcccagttttaaaataataagtaacaattttactatgaatcaatgaaaatgcaatcaactatggattatacagtattacagttttcagtgaatgcttatgtcttttctctgtcctttccctccaagggaaaagttgggaagtaggggaaaacaaaaggagaaggcattcaggcaacaattcctcatatattctgaaaagcaattagatgcaagtcacatttgatttgttgcaattttaaggattctttgagtggacgttggtgtgggctggccggcagggcatcagggggacgttgtgagtcctgcccctcctttagcactaattttaaattagatttgaagagtggttggtgaacagccttccactgcccatttgcagtgaaagagaagagccttgagaaggacgtcctgctgagatggtttttcatagaaggtgtcatcatattcgtgttaggaagacccagagtgagactggcaattggcatttcatggaaataagtgtatgaaatgatcctggattggtaatgttcaccatctttgtataaataccaaaaatggaggttgtggatcactacagatgatgtccatgtcattctctgcttcctgttagcatgcaagttctagtgtgcgtagcagtagaaattatgaataaatactgtctgttactgatacatatgacttctgtacatggaatcacttgagtattctgatgtaaggccatttggagaattctaaaaatgcaacacttgattaacagccccccacccacccaccccagccccccagtaaaactgtgaattcaggattaacaagatacaatgagttcatggatgttgtccaaaaaaggaagaaactatattttgacatgcttggttttttttttttttttttttttggacatgtacttatattagttttgctgggatgccataagaaagtgccacagactaggtggcttaaacaacagaaatttattttctcacagctctggaggctggaagtccaagatcaaagtgtcggcagatggtcatttttatgttcacatggagttctcctgctgtgtgcgtctgtgtccaaattttttcttcttctaaggatgccagtcatattggattagggcccactctaatgacctcattttaacttaatttcttttctaaagactatttccaaatacagtcatattctgaggtactgggtgttaggacttcaacgtgacattttgggggatacagttcaacctataatagtactacacttttttaagtgattgtggggagctcttgataaatgaatttaagggtacactctggctctgtttaaccaagttcttacattgatttttatagagcaaaatatttcacttctactcattactatgtaatctcacaggctggttgagttttggaccatttgtcatgtatcttccacatatcttctatgtctctctctctctatgtatacatagtagaaagagagagagacagggtatcactatgctgtccaggctggaccaaatgaaccttctgtcttggcctcccaaagtactgggattataggcatgagccatggagcctgtgctactttgtattttaatgtagaactattctcaatagagcagtacccctcagactttgaggttatattaatgtcctacagatcttgattcagtaggtcttgggtggaacttgagatcatgcatttctagcatgttctccagctgatactgatgctgccagccctcagaccatagcttgaggaatagagtcaggagtggctgcacaatttgcaggttcagtgtttcagaaccactcagtgtagcaaagccaaacactaacgggattgcagcaagagaaagtgagacatttattgcgtggccccaagcaaggagaatcgggcagcccatgtttaaaaccccaactccctgatggcttacaggtagggatttttaaaggcaaggaggcagaggtcacaggtatggtaataaattcatacatggaggttgtacatggttttgacctatacaggtgggctttcttgaagcgccgggtgattaaacgtgataggtagattttaaaattttcagatttgcagttggttaaggaagagaagctttgtttaaatatttggggtcaccagaaaagaatgttagctgtggcttgtatcacctcagatagactttacagcaaagaacaagaagagctgtcagaggcccgccctcagttttctctcacctgagctctgcgtgccagcaggtctgtttagtaggggtccaggtttctgaaaaacaggacatatgctaagatgttatcttacatttctgttgagaacaaaacatctcatgactctaactttgttggctactgttttaagcaactgttaccttcttatcaaattgctcatttacttctcagggctagcaaggtgcctggcatttccctcatatgaactcaagctttttctttacttccatgcctggaaggggtggaggttaggcccgtaagaggggtccctgcttcatcttagtaatgcagaatgaaaatgcgagtctattgtttaaaagtgattcagaattttgaactggtcaccgcagagcaagacacctattgtggcccctgtgtgagtatacgggtgattccacccacggagccagccctgagctgtgtgggagtgctgatggaaattatctcagggcacttatccgcaatgatttgtaagatgatggcttttattggccagtgatgaaatccttatacttctaactagtcatggttttacatagtacttgcacgaaactcagagcatggaggagcattagcatgcaggagacatagctaaagcaagttgctcctgagactgtagatatcttggtgtctaaaacacagaatatcaccaccaacaccacagtgattataatatataacttgcccttcttttgcaaagtttcaaaggaatctagggtatgacacatgaattcctctgcccaatgatgatgattctcctttgtccttgaggtagcactgtgcctgctttttaatggtggtatttaactctgggagcaacattcattgcatttttcagaggggaacaatcatcatcatcataatacaagattataaaactcatgggtcaggctttgcacggtggctgacacctgtaatcccagcactttgggaggccaaggagtttgagaccagactggccaagatggtgaaaccccatctctactaaaaatataaaaattagccaggtgtgctggcaggcgcctgtaatcccagccacacaggaggctgagacaggagattgcttgaactcgggaggtggaggttgtagtgagtcgagattgtgtcactgccctccagcctgggtgacagagggagactctgtctcaagcaaacaaaaaaacacaataaaaaaaataaacattagcctcagtggcttatattttcattctgcttaatttaccatgtctacccatgctgggcattaggatgtcaattttggggctgtggtcccagttgactggactagaaaaatgagtttgtcccgtatcacccctacatgagtgccttctttttttcggagatggagttttgctcttgttgcccaggctggagtgcaatggcaccatctcagctcaccgcaacctctgcctcctgggttcaagcgattctcctgcctcagcctcctgagtagctgggattacaggcatgtgccactatgcccggctaatttttatttttagtagggacagggtttctctgcccaggctggagggctggtctcaaactcctaacctcaggtgatccaactcgcctcggcctcccaaagtgttgggattacaggcctgagccactgcgcctggccatgagtgccttaatgcttagaatcatctagcaaatatttttcaaatatggctagaaacaaaattttctttaatcattatgcattttacagtgccaaaggctgtcagagtatattttttccccctatagtgttcttatggctcagtgatgaataaggtggatttgatctgtataaaaacacagacactgatgtgctcagtcatacatctttagacctatctccatttctctgccccttcccctccctttacattatgagagctctgcaggttcccttatggaagtcacagaaatgttttttcagttacaaggtatgatgaaaatggtctgaggtctattcctacttatcctactagattgcctcttggtgcttattcaaattcttgatcctgaattcctttaatcaagtaattatttcaaagaacataattaggtttccatagggtcgttacttcttttatattcttggttctttttaccttatccacccgtatctttattttcagggatttccatatccatcagttgggactgaaaactaatctgcattaaagtagcagttgttacttgatatgacttacttttttttttctcatggatatttgaatgttacaggatttgggaaggtaatttttttaaattactgataaaaatcttgtggaggattctgattctcaggtctggaataacctgcattttttgaataagtggagcattcacatgtggtttaaaattcaaaatatgtaattgatgacaccatatccgagccattcagtttccttctcaggaggcagtgttgttagtgggtgtgtctgttgtgtgtgttcttctagagatagtttatgtttatataagcaaatgcagatataccttcctctcattttacatacttttcagttttctaagcctttagcaaaagtatataaattaatgttatgggattttacaaaaggcagaagccttcaagactataagcagtgcagacagagtgatttgaatgataggaagtaggtatgctaagtaacctctgaaatgacacccgcacaccacaattttcactttctgtgcacagagatggtactatctgtagatttccagagttttgccaaaaaaaaaaagaaagaaaaagaaaaaaaaagaaaaattagaaaaagtggtgagccttagtactagaaatagtaaagaattagcaggtgaagtttagcagattttttttaaattaacattgttagtttaatttcagttcctaatagattgatgaaataaacattaacaagaatgtgtaaacatctgtaagttaatgggtgcaggactaaagcattttaagtagtaatcatcatacaaaaacctgattgctttccttgatagctctatggaattacttaattttaaaaaggctatagatgttaaatatcacgattttcgagtaagtgattttttgaaatcttattcaccaaactaaccgaattggataaagaaatgtcaagtgtgtaataaactgtccaagagttagtggcaattgaaaacatatcaagttgaagagaaccacaggataatgtgtatcttttcttttaatgatctagaagaattagctaagcaatatattaaatctacagatgatcatgaatgaggtgttttctttttgttttttatgagtgttactgagaatgaagcagtagggtcaaacatgcaagtttaataaaatggcaaaagatgaaaaaaaagtctttgcaaaaagctaactaatgtttctggggatggataaatccctaggaacaagagaggggaagacctaatgagcctgggaaaacctaatgagcctaaagtgttttattccatgtaacgaaaacatatcaaacagtaatcttgggtgactagcctatttttttgtctgcccagttagcttaattgacagccatcattagatggcattatgattgggcaaaccaggaacttctgcagtaatggaagttttcaaaaaaaggtttgtctctcaactgaaaaataatagacaaacatcacagagacgcttaaaaattgattgagtcaggtaacgtttgttttcatgtgaattattaggaaactccgctcgattagttggacaccatgtacctctctttttcaaggtactgtacacaggagcttgagaagagatgaaatggggccaagaaactagcatctgaatgcactttactaaaagcattttttctgttttacatatgttttggcttaaccttagagatgttgcaatatcctaacaaatgccttacagagaatccatggccaaagtggaactgaaagtcctaggtctttctgccaagtgcataactctttcctccttactacactagaaagactttagcattgtaatattctgagacaacatcagtgattcattcctcattttaggaagcagtaagggataggtctacatggacaaagaggaaggtaaggtttcagtctctaaagcaataatggtgggttgcccttttgttaaagagtctcatgtcaacaaattcatgtctagtttaggctaggaagaaataatagttgggaaaacaatagcttgaaaaatcagtagggcatgccaggcatccttgtatcttcacatttgtgtatcacgtataatctaagtgatactaaaaatttgttacgctctaataaatgatgatttatgtataccaaaggctctaataaaatatctagaattggtagcatcatagatatgaattaaatagatggagatgaagtaattaaaattagttcctaatttgcactgattttttttaatcttcaattttgtaggaaaaaaaaattggagcattaaactgatagaaaattgtaaagaacattctgcttccggtagggaaaatggtctgttttcttttcttactttaacataagatcaatactaatgtcatttatattgtactttagtgtttacaaagtagattcacatatattctcttatttcatctgtgcagtaacctctggaagataaggtttcctcattctgttttttaatgtctgtttcttaactctgtgtaaaggcagattgattgggcctcatttcctcaatttagaaggctggactgattgatggaacattaaagaaggcagaggtaaataagggatagtgattctaaaaataaaagtgacacttgaagtggtttgactagcagtctcacttatttttccaaaggcaaaaattaaaaaaaaatcaaaaagacaaaaattaaaacccagagatactaataaaagcagggagcacatgtatctttctgatcctaacacttagagtagcagctatcttgacagcctatttttgtgaatagaacacttagatgtccatttttaaggacaactttgttttttcttcctggtgttttgttgttttactggcatatatctaaatttgatttaaatttcatggcattaaaccaaaaacttagatggttatatcgtgtcatttgttatatttattcagtatttgttggtgcattttggtaaattttttactttattagttggggttatataccaccacatttaatcccaggtactcacaataataacagcttaaacatgctaagagtttgtttctctcttatgtgaaagaagtcaagcagttggcagtccaggtctggtatgtattgacaaccccagtgtcagagaaccagacacttgtctccccgaagtatcattcttagcagtatcacctcatggttcagggtagctgcctgagcttcagccatcaggctgatattccaggcagcagaaaggaagaaagaagaagggcacctggtttcccttttaggatgcttttgtgaggtacaattagcattcttgtctttaacttcttaaagctcatgcgaaaacagcttactgcaaggtgagcacatgactgcctagcttaacacagaatttccttatgaaggaggactagaacagtggatgttggtgtaggcactgcttagtctgtgtcacatatagcgcataacacatcaatagtgagaatgcttcagttcaaccagttcatggctttgggggctgtaccaattggtttataatggttatgattttgtgaccaattattctttatgtggagatatatataagaggaactgctttattcatttagaccaataaaagcgatacctgaagtgatttgtggacaagtggctacaagaggatattggtgagcatatttgttcccatgagtcattttctaaccagttatcctaacactgggtttctgtactgtctttaattttcacattatctctaaagtcttcaggaggaaatataagcagtgtggtgctagaatagctttctatgtgaattcttttcccccttattcattactggaaccagtaattgcctagagaatgatgggcaaaatgccagctcatcatttctttaagggtctaagaattggctttggagaatggaagaaaattccagaaacactgtcaagaaagttattatttatttcaaatgttatttggaacagcaaaggacaatatgttttatagcacaacttttaagatgactgaattggcaataaattcacatgatgaaacttcagcaagtctttatgtttctgccggggaattctttggttcttggcgtaaatttttaaatagttaatatcagcttcctattcttaacattcctttagttgtagagctaatgtgaaaacagcttgctgtgttgtgaagaatgcctttagttagccaataaatcaactcatgcgtgtttcagttgtcaagcatgttaaatagtagtttttagacacaagagggattgcccataatatcgttattgtgagattctgtttctcatccaccacgaatgaaatcccttctttcccagactgcctctcacagcccctccagcactgtggttcaactctacaccaagagatgacaagtcctgggttctcaaagacttggattttggttctagatttgcagtgtaggagtcaggcaaatggatgtgtctcttgaggcattagtatcttcacatttcagacaagggcttgagttaaaatactgtttcctttcacttccaaaattctataactctgtgcaatggtttttaacaaaaatctttgaaaaataacctaaataggccgggcgcggtggctcacgcctgtaatcccagcactttgggaggccgaggtgggtagatcacgaggtcaggagttcaagaccagcctggccaagatggtgaaaccccagctctactaaaaatacaaaaaattagccgggcgcagtggcaggtgcctgtagtcccagctactcaggaggctgaggaaggagaatcatttgaacctggagggtggaggttgcagtgagccgagatcgtgccactgcactccagcctgggtgacagagtgaaactccgtctcaaaaaaaaaaaaaaaaaagaaaagaaaaagaaaaataaccaaaataaatttctagaacaaatttcccaagaatcccaaataaatattaatttatatttaaagatgctgtatttaaacagtgcaataattatgagcttttaaaggaatctaaatcaagatatgtttaacattggctacttacgatgagttcaagtacttaagctaatttttagcttgatacctgtatttcgttgggggaaagaaaacaatatcacttcacacactgatcatgttttatattttcttttagaaattaaatgattaatgtgttagaccatgtaagtcagacaaggaggattgaaggacataccttatgagtcagctaaaaatcttgccagttcaaatagtacacatttccttgtgtgagcagctgtcattgttctgaagttttggaagttgtggtgaataatacgttgtgtctctaagtggccctgctattgtaatctgtggttactctttaagttatggtggaaatctttacgtgaccaagcttgatcacagtttcaagcttaaaaatttaaatgtgggagatgataccaaatttttggcaaatgttttatggcccacagccaggattagtaaaaactatggttaatagataacttacagttttctgtaaacatattaaaatgctttttgggattcaatcaagcttgatttatttgtttatgaatgaatgaatgacaggatctcgctctgtcacctagctggactgcaatggtgagattatagctcattgcaacctggacttcttaggctccagtgaccctcccacctcagcctcccgagtagctgggaccacaggcacgtgccaccatgcctggctaatttttgtatttactttttattttttttttctagagacggggattcgtcatgttgcctaggctggtctcgagtgatctacctgctttggcctcccaaaatgctgggattgcaggcatgaactactgtgcctggccaagcatgctgtaattggaaaatttaaaatgcttttctggctgggcacagtggctcacgtttataatctcagcactttgggaggctgaggttggtggatcacctgaggtcaggagtttgagactagcctgaccaacatggtgaaacctcatctctactaaaaatataaagaattatccaggcatggtggtacatacctgtaatcccagttacacaggaggctgagacaggagaattgcttgaactcaggaggtggatgaacctcagtgagctgagattgcaccactgcactccagcctgggagacagagtaagactccatctcaaaaactatttttttttttttctgtagtgaaaatggtagctctaggctgtaatcccagcactttgggaggccgaggcaggcggatcacaaggtcaggagttggagagtgggtggatcaagaggtcaggagttcgagaccagcctgaccaacatggtgaaacccagtctcaagaatacaacaattagccaggcgtggtggtgcacgtctgtaatcccagctactcaggaggctgaggcaggagaattgcttgaacctgggaggcggaggttgcagtgagccaaaatcatgccactgcactccagcctgggagacagtgtgaaactccgtgtcaaaacacacacacacacacacacacacacacacacacacacacagagaaaatggtagcttttatttatttagttcacgttgtctgacagtgaactaggcttcttacgtattttttttcattgattttaaccaaatgcccattcatgagtgaggaaactaagttcatctagggcacctgggaggggcagggggcgttacggaagggctcacctgacagcagagccagaggtgcacatcctcacgcaaggtagtgcttagaggcgctggggtttattgaaaaggatgctgctacactggtttaataattttctttttcttttttttttttttgagaccagtctcactctgttgcccaggctggagcgcagtggcgcgatcttggctcactgcaacctctgcctcctgggttaaagcgattctcctgcctcagcctcctgagtagctgggattacaggcgcacgccaccatgcccgtctaagttttgcatttttagtagagatggggtttcaccatgttggacaggctggtcttgaactcctgactctgtgatccaccctccttggtctcccaagtgctgggattacaggaatgagctactgcgcgcagccttataattttctctttgaataagcagatatcttgaaaaggtatatgcttaggctatctagctcccctccatcttcctcaacacctctacctataagtggtataaattcaacctgaactaattataaaagaagaaattaaaaatttcagccacataaaagtctagttagtatgtataattcaaggactggtagttaactcactgttagacaagtaggtaatgtgttccctcagcgattgagtgtatttgagaagttggaaacactgaatatagcttggtaagggctcagtggcctctgtagaagggagcttgggtttgaattctagctccacaaagtacttgatgtttgaccacctacagcttcagtttcttcatatgtaaaatgggctaatagaactcacctctgagttgtcaggttaaaatgagctaatgtgtggaaattacaactgtggtgcttggcatatactatgttctcaataaatattagttgctcttgctattttaaaacttattctttgacaattctgttgctcattggtatgggaatactttcttatttaagaaaaatggcatgttctaacccatttatgcctgaggttgcaattttgtgaattttgaaaatcagaccttgacaatgactttgagcagtaggatataaacaacgctcgcatgcttggtgttccagtaatggaacactaggcataaatgggcttaaggatggcagtatgtgatgattcaggtaaaaaacttaaaaaaatttttttcagcacgaagttttgctgtgttttggttggaatattgtaaggaggtatcacatttttaaaaagcttatcttagcctctaatctcagcactttggggaggctgaagcagcaggattgcttgaggccaggagttcatactgagacactgtctctacaaaggaaaaaagaaaaaaaaaaagagcaacagaaaacaaaaaaacatagccgcatgtagtgaggtgtgctggcatgttcctgtagtcccagctactcaggaggccgaggcaggaggatcgcatgagcccaggagtttgaagctgcagcgagctctgattgtgcccctgccctccagcttggttgacagagtgagacccctgtctgtttaaaaaaaaaaaaaaagtttattctagcattgactaatgcattaaataaagaatttctatgcctggtcagcataaagccctcatcttaaaatttaaagaatccatctatgtacccacgtgtgtgcctgtgcacacgtgcacacttccacacatattctagtagtcatgtggagttagtgatgaaattttttttcatccccattttacagacaggagatgagccatatggtgctcattttacgatagtgatagaatgatggatttagacagaaggaaaggtgtgtgaacagagacacattatcgattctcattcaaatcggattcattctgctatgctgtgttgccttcagctgagtgtccagcggtttgaaacatttctaaattttgatttggggccatcatgcagctcagtgcttgtgcttcggtgcaaggtctcttgggcagagatgctaatttaagaatgttgtcggtttaaatgttcctaagaggattaagcaaattctacagcatataaatggacatatttggaagatttttttccccaagcaatttcagaaaacacacatgcatcatttgctaaaactctgcaggtgtattaatgagttcatctcacatgaatggacagtcactgagggaacttcatatgtaggcttgagttcaggtatatgaaatgcaggctaagttttaattagaatttatttacagctcgaagctgctcctttgtttttctgcctgaagtcagtaatgaaccattcctctttgcctagtcattagtattcagagctccatcagcctgcagttcaaaccctttcccttgtttttgtcagagaagatgatggagcaaggttgcttagaaacacttagccacactctcaacgggaattatcaatctgtgctgtatgttcacccccacacgcaggggagaaaattgagttttactgctgatgacgttaattgattgcaagttgttttagtgggagtgtgatgttgaaaaccagatttcctttcatttttatgcattagatgcagagaagctatacagtgacatgttcattccactgtaactaaaaatatcatagaggtatctaaatttggttttgtatgttttatattcagatcttgacactggtcagcttacaggattatctttgggttggagactgtttctgtagtgatttctttagttcccagtaaattcacacagtcatctccttcaatagagttctgattagtgcagtcagggggtgacacactaaattaggggtgggcagaggggtgaaatggaaaccagctgttatctgcttacctataattttatatggtccaaaaaaagcttttgtcttttttttttcttttgtccctgttcttttcagatcatcttcttcaaaaatttcttgccttaacatgtaaagagtgcagtgtgtttctatgggtgatttaatttgacttgtatttatttttaaagattccttgatttggctattaacaacttttaaaaggtgaaacaaacattgctgatgagagaatgcacaagcaagcagacagcccctctggaaggtcgggatggcgagaattggggtgaggaagagaggccagaggcaagcgaactgtattatgttgtttaggattttgtcctccacagcatctaagtggatgtgtatatttaagcatagtgtcttttgttatactttatcatggattcccattgaaagtaatagattgagactttgtgggggagggcttaccctgtacttctctggcaaacatcagtgattctgctgcttattcattcaagactgcacataaccattgcctgcagagcttgaagaagcaacacacatttccctgactcgttcttatgagtcagtagaaaagaaagatggctaagcctatgcctggtgcatctcagttagaacctacagagaagagctcaaatacctgattttctttctttctttttctttttttttgagacggagtttcactcttgacacccaggctggagtgcaatggtgtgatcttggctcactgcaacctctaccttccaggttcaagcaattctcctgcctcagcctcctgagtagctgggattacaggcacccgccaccatgtccagctaacttttgtatttttaatagagatggggtttcacgatgttggccaggctggtctcgaactcctgaccttaggtgatctgcccaccttggcctcccaaagtgctgggattacaggcatgagccaccgctcccggccaaatacccaattttctacaagtgtcactggaaagtgctgctcctgtaacttaggagatatgaaatatgagttcatgtgtcaggcctggggtttcttattacacagaagctaaccctatcctaaggggtgtgctctttatgtgcagaaataggagataggagccaaattatttctgtgtctaccaaatttttccaatttgaggaaaatagataaagcctactcccttgtgattatgtcccaagagtttaaaatcaaattaaaatttggtgttgaaatctcaatttcctttaaataagatgacttaaaaattaatagtcactggtcttaattatgaataatgcattatcatgtaatattaagcctcacataagatataatacgataaaaattctgggatgttgaatctggtttaagaatttgtgcattctcagaattttgttttactttcattaagaaacagtacatttaaggccaggcatgatggcttatgtttgtaatcccagcactttgggaggttgaggcaggaggattgcttgagcccaggcatgagctatgattgggccactgcagtccagcctgggtgacggagtaggaccctgtctctttaaggggggagcaggggaggggaggagaaccatttcagtaatcttttctactttatgaatgtgttcataataaagactcctgtggaaactgttctggataaaattattagtgcaagtagtgccagaatagcagatatttctgcatggctgcttaggaacttagtttttgctgacaattttgaaaatgtttcttattccaaagtgcttagaggacctccaggcttatgattgttctttcccaagagtattttttgagggacagggagaaggagctcctatatcttggttccgtggttctctgtctaaagggaacactgccgtaaatacttgagtcatactttaataaagcccatagaagagtgaattgggcttaactccctcatttttcatttgaggaaactaaactgcctgagtgaggcctgaaagccgtttttgatgattttcaggcgtatgcactgggatgggtcactattttggagtcatgtaactttggattttgcatatgtctttgattcctggtgaatgtggaggatttccatgctcctcttggtagcaggagcactgaggagtgaatcctgctatattgcttgttcagaggcctggaggacacaggaattatggacaagtgtctaaatttggtgatggtcagatcagaatgctgagagactagatatgtctgtcagtgaaactgtgaattcaagggaggagtttgggaaggattggcacaattaagataattaaaatcatttgcttttgattgtttaaagtaatgatttttaacccataagtccagtgtcccctttttataatcaatattttgtaaatcttttggtatcctacaataaaattcttagaaaatataacctaactgaaaatacaaataaatgaataataagtaaatagaaaaaagaaagtacctgaattcttatagaatatactatattaatttataatattaacattataggatgtattgtattataggctaatttgctctcaaaagataaatacaaagggcataacttataataaaaatatcaatccaatatataaatgctcaagcatgactaaactggaaacaaatgccttcacaatgtcaaaacacctcccactgggtggcagagctcctcttgacaaactcttggttgaatacttcacagtggcattgtatgaagagtgtgtgcatgaagcaagtatagttcggtacttggaggctgattctctgtgtgtgtgtgtgtgtgtgtgtgtgtgtgtgtgtgtgtgtgtgtgtgtttttgtttgtttgtttgtttgtttgtttttgagacggagtctcgttctctcacccaggctggagtgcagtggcatgatctcggcttactgcaacctctgcctcccaggttcaagcaattcttctgcctcagcctccttagtagttggtactacaggtgcctgccgccaggcctggttaattttattttttgtcttttggtagagatggtgttttaccatgttgcccaggctgatcttgaactgctgagctcaggcaatccacccaccttggcctcccaaagtgctaggattacaggcatgagccactgcacctgctcgattctgtgtattcttacttagcgaagactgtaatacattcttgaaattcttacctatttttaagagacagggtcttactctgttgcctaggctggagtgcagtggtgtgatcatggttcactacagcctcaacctcctgggctcaggtgatcctccaacctcagcctcttgagtagctgggactacagacatgtgccatcacacctggctaatttttgaacttttttgtagagatggggcctctcgctatgttgcccaggctgatcttgaactcctggcctcaagggatcctcccactttggcctcccaaagtgctggcattacagatgtgagccatcacctgacttatccttgaaattcttgatattaagtacagatgctattttaaatcttcaaaatttggagtatctgtgtatgcagtgtcccctagaaaatatgtaaggtagacaacgttgagacctttttaggatacaaatagaaaataagatattatttaaaaaattctgccaccgaaatggattttatgttaaaattcattattaggtttcacaattgcattatcacttttaataccacagctagttgttatgttttatctatagctttagaaagaaaaaaaaaatcaggccatatggcctgcgtaagagatgacagatgaagagcaacaaaacccccgttagttttgatgctgatcagtcaaaaattaacttagtcactacttaatggttcatctgagctcagtgtgctttttcctctttaagtttttttttttttttttgagacagagtcttgctctgtcaccccggctggagtgcagtgatatgatctcggcttaccgcaactgctgcctcccaggttcaagcaattctcctccctctcagcctcctgagtagctgggactgcaggcgcacccaccacacctggctaatttttgtatttttggtagagacagggttttaccatgttggccaggctggtcttaaactcctgacctcagagtgatccgcttgcctcggcctcccagagtgctgggattacaggtgtgagccatcgtgtctgcacctctttaggttttaatgagacagggtctcactgtgttgcccatactggtctcaaactcctaagctgaagtgatccccccatgtcagcctcctaaagtgctgggatttcaggtgtgagccacttccccagcctcattgtgcttttttcaagtcacaatcttggaataatttctgtcttggttagttttgttagtgagacaaatctttttcttccttatagcatcagtaatattttcaagatacaaaagaatttgtagaaggtatttagagttaatagttgcttgatctagtaattcatagttccaaatgttcatatttatgacaatttgaaaaatgtctttttttgtagaaattctagttgcttgggtaacgcaaaggcaaataatttcttaccagatagagcataataatatttgtattctcccactaaatctagagtccaacattatttttgcttgttaggtaacttttttcaaaaaacaaatggttttgtttatctggatagctaaccttgtgaaagcggtgcaacatcaaattggtacagatattaatacctgcatttaaataaaagagtaatttcacaactcagtgttcccaaaacttgacttgttggttcaaccttactaggtatattagcattcttaattgaatcagtcattgcattcttcaacaaaagtttccattccatctgttctttggtttataattctttggtgtgtcgtttgctttatttcccaaatatataagattttttacatttagaattattgctagttttgctacaccatgctgaagaggaagccttgtgactttatgttttatagtatctgatttgcaatggttaatcctcctcacaggattgtaaagcccaaatgagtgatatatgtaacagacatagaacaatgcatgtcaatgttagctgctcttatcatcatcatccttttactatcatcagcagcataagaagaagtttattctaaatataaaatctttgccaaaattttatcaattaagatactttttttgttttgtcttgttgtttttaagacggggtcttcctctgtcacctaggctggagtgcagtgaggtgatcatagctccccacagttgtgacttcctgggctcaagtaatcctccagcctcagcctcctgagtagctaagactacaggtgtgtgcactactacccccagctaatttttacaattttttgtagagatagggtcttgctatgttgcccaggctggccttgcactcctggcctcaagcaatccttccctcctcagcctcccaaagttgggattccaggcatgagttactacgcccagtcgaaacatttctgtagataggaccataggtgcttgatatgtgtagttctgccccttccacatgttgttgcaggagagtagttttatatgcctgatgatcagaacacttgacacttacaagaatgtggtctagggacacctgggatcctcaggacccttttaggatttactgaggtcacaagtattttcataataatgctgtcatttatcttttaactcctgttccctcctgagtgtacagtgcattttccttgtagctgcttcatgtgctggggtgtcatctgtctgacagtgtgtttgtgacaatatgtgcttttctattgtttttctaaaattttatttttcggtttctgatatgtagtattcatggatttcacccacatgaacaaaagctctctggagttctccgtgatttttaagagcacccagattcccaaggcatcgaaactttagtctaaattggaggggaccaggccacagctcctaagtcccacttggcagtttgaatttggcaactcagttggctcactgcagcattagggtaaaaaattttgaaaagtctattctgtgttatctttcatggaatcccagaattgaacattttaatatccaaaggggagtggcaattttaacttcatctagtaagaatatattagtgtgcctctcacaatttggaactcaataattaactattagaattctcaatggaaacaaaaacagtctatacatcttgatttttcctgaaaagtccttggtaccccaaccttcagaagtaagaagacacacattgccaagcacagttggaaaaccacagagtttgctgtatcgcattgaaaaaataactccaacaatgggtagaaattgaaatatatgtatttgagtattttggccagaactgggagagtaagcaacttttataattcaaaactaaaacttctttacttattataggattagatagatgtactatgttaagttttctattttgagaaaattttgtctgagcctaatatttgtctctgtttgagggaaataaaaaagtcttacgataacattggaatcacctattctttatatacagcttttaataacaaaatgagaaatatttataatgtaatctgttttttttttttttgcttgagtaggaagaaaaatcttgcataactaatggtcatttaatcttcattctttaatcttcattgtgaatgactttagcgtttttttcctgaggttagattttttcaaaaataagttttgatatcctttagtcatgctgacttatgtccactttttaataaaattagtcactagtaggtgccgggcacggtggctcacgcctgtaatcccagcactttggcaggcggaggcgggcggatcacgagatcaggagatggagatcatcctggctaacacggtgaaaccccgtctctactaaaaatacaaaaaattagctgggtgtgatggcgggcacctgtagtcccagctgctcgggaggctgaggcaggagaatggcatgaacccgggaggcagagcttgcagtgagccgagatcatgccactgcactctagcctgggcaacagagcaagactctgtctccaaaaaaatatatatatatagtcacgtgtaacacagtgttatatttaagcattgcaaatttactttgtgaataatttctccctcataatttaaaaatatttaaaaatcaaacccaaattaaatatccactgtaaattatcctatagtaaatgtcctgtggtaacatgaacatttcctccccaaaccctcattattctgttgaatgattttgcgtttctctacaatttccacatgttgatgtttgaaccttaatgcaatacaatttttctcatgttgtatttggctaatgttgtctgctgtctgcttactcaggagagtgccacagtgatttgcttctgaaggaaaataaagttatttcttagatttgtaaaatacagttcatctggcattaaatattttttaatacttttacttagcatgaacaggactttggaaaatttgatgagtttagatttgaatatcaataaccttagtgagtgtttatttttagatggttttgttaacatttttatttggagataataatatatactgaaaatgtaattaagtctctaccagttgaagtgtttcatattcagtattattagaaaagtgaagagtaggaattgagcaattaacatttgagtgcatcttttttacaattgaggaaattgaagttcagagaggttaatttgccctgaagtcaaacagccagcaagttctggagcaggactttagctcttctttaactgcagcatctctgttctttagcttggaaatcgctgcgtctgagaacaggggaggtcacgccacatggtctgccaccccacagctgcaagagtgtgtaaatcattattcttaagactcagaattttgtttcttatgaaaatgaatataatctctgtagtctttgtaaaaattaaacccctatgatttttatatcttatttctataaattccatgaaataaaatttgtagcggttttttggtaaaattgtcaaagagaccagttttctttcttgttgtctagaaactttcaaaacgagcaagattttgattcaaaacagaagtatttaaaatcctaatgaattaagtcctcttaaaggatatctcatttgccaataatggaaacatcaccgtatgacttgttgaatataaacctgtgatcattatggtggcaaacttcaaccacacttgtagtactaactttagcagggtaaatttcgatttacctttatggtcagtgatattccagcagcataaaatgcaatttttggaaggctgttcctaaaactcattcccttttcactaagaactgtggataacagactcaaatgtggttcagggtggttgcagatggacactgggaggcagaggtgagagagcagaatattcgattaccccacaggaagaaagctgcctagtgaatggaagacagttggttttgttccttaacctgcccatgagcagtcattatcccattgacaaaactagattctcttttgttggatataggatacaaggacacgttcctcgtagtgaactaatcatgcttgctagctagagcctacaacaattacatctcacgattctgaggacagatggctggaggataattttgaaattgttcatgtcacatctattgtgcaaagcttcttggtacaatattgatagcttcacgtccagctgtagctgctggtttcagatcttcctatttttatcttattgtttaaatgaataatgtcattactactttaaaagccactgaaaaatttaaattagattaaattgtcaaagtgcataactgatgtttgtatctctctgtccttgtgttaattaaggatttgtaggaagtgctgtggatgaatttaacccgtgagtggttgtaaatctgactagactacttgtttgatgctaagtcaaacctgtgtaaaaagaaaatgccgccaaaggactcaacttttcttaaggtttaaaactatttcagaaatgacttggcggtttaaatgtttataatattggtaatcacagtatgttaagcacacatgcatatgtatatattttaatattttaatgtaaaatagtctcgttagtctccattctttaccattatttttgaagtgaacatttattttgacattgtttttaaaaaattgtatagtggattagcatttatttttagaacacatgcagaatcagtccatcgcataatacaaatataaatgttgatatcagtactttgttcagtatcattttctctattgcacatcacctagcaatcctccttttaggaatggttggctcaacaagatctcattaaccttgtgttttctttgagtggtgcactatactaacagctataaagtgcatttcctgttatttgtttcctatgtggcagtctttcttaacttgtcaatactttatttccaagtctttatagaggaagtgactatagtcaaagaagttaaatgttatcttaaaatacacttaaaaaaatcctggaagtacctgaaccattttagaaatattcttgtcatttttactctttaaaatagtacattcaaaaaaagagtgttaataataacacttaaagatatattcttatctttaagcaatattggcttcaacagcagtcacatcagtgtcttgtgctttatttggcctgatgtgggaatggatggtgccaattgtaaaaaaaactttggttaatttatttagtcagtatctagatagaactctataagactatgatggggcttttgtgtaatattttctattgtaaaagcaaaagaacacatttcttgtgcatttaggtaagagaaaaaactcacatatttaaaacctgcttttttgcgggagggtggagataatacacaggtaaatttttattttggtttgttttgcaccaccttctttccatttttggtcagctgttcaggctgcatttccgggataatgtatttaccatgcattttagtcattgtacctctcagcctccagctggccttcccccagggtatctttgcacttgcaggtcagaaaagaccaagttatgaatgtgatctcattttcaagggttttaatctgtttttggaattagtcaaaatctgtgttttgctgtaagattaagcttgtgaaaggctgcaaggctttcctctttgcagatgctttgaatgacttgtatagaaatgtcccacagaggtgcttcctgttgttttcacatccctttcaggaatacacaagcccccctgtttgtccatctctgagaaagacaaaatagctcaatacttcttgcaaaatagaaaatgtcatttgttggttgtggtggtaacagggccggacattattcctcattcccatcccaaaacattgttgactcagctccagacctcatgtagtaagaacagccgtcctcctgtgttatcactggggtggctccaggatcgatggaatgtattgagttggatcatcagtgccagttcactggactgtatttaatcattgaaaaatgaagatgtgtattttccttttgacacaatggaaaatcagttgaatcacgactttttgttccttgaatttgaaaaatggaacaaattatgaaaagccaattatcaccatcatttgaattccacattttttgaagctttcctcccctcaaaaataacctggtgatctgattagtgttgtcaatttccacaggatcttaagggaaggggccactgtctttccacatctgaaaagtgaatgccataaagataaaacagcttatcaagccatggtgtgaggcacactgtgcatcaaaatcacttcttaaaaacgaggattttaagaaccaggaacacaaagttgttaaagagcaagttatttacagagttaagataaaagtgtcccggctgggtacggtggctcacatctctaatcccagcacttgggaggccgaggcgggcggatcacttgaggtcaggagttcgagaccagtatggccaacatggtgaaaccctgtctctactaaaaatacaaaggtagctggttgtggtatctcacgcctgtaatcccagctactcgagaggccaaggcaagagaatcgcttgaacccaggaggcagaggctgcagtgagctgagattgcgccaccgcactccagcctgggtgacagagcgagactgtctcaaaaaaaaaaaaaaaaaaaaaaaaaaagccttgctcctttgtcttttatctgaccatctggtcttctgtagtgaccagacgaagaactgtcttaatataattaaactagctttcatgatgaagtatacttggctactagatgatcttagatttctggccagcaattaatatcactgatggtctaaagttattttaatgttattcattttatagacagtattgctcagcatagtgagtatgggcttgagagccaatctgcctgatcttggctccagaagttaattagttctgtgcacttgggcaagtttcttggcttttctgggcctcagtttacccatctctaaaatgaagataagagatgtacctacattgtaaagttgttataagaattaaatgagttgcatgaacattggagatgtgttgattattgtatttcatacatacattaaaattatattaatggcttgcaattgtagacagatcatcaaatgtggttactattttcacaaaacaagaacatcctaagtgtctactcattcaacttgtatgcaagtaacagaaaatccatccgaaagagatttaaacaataaaggatctgtatgttgcataatcacaaaataggttgactgtgaattaactgcataatgcagtaatgttagcaaggacccaactctttctctttcctctctgcctcttcgctagctcttttccgaatcacagaggctacagcagctccatcacacacattccagctacctgagctggaaacctaccctcaaaaccctccgaagattgctgatgacttgtgagcaagacctgtgtcttttgcctttttctaagcaaatcctgaaatggaatgaaatttactgtgagttacctggtcaaccagagaaaagtagatccctgataaaatcagggttctgttagtgaagaaggaaggttggatggatagtgagttagccagccttgtcttgttgcatcatatacttttttatataaacaatattcatgtataaattaaaaggctaacattggatgacacactacttctctgtcaggagatggttaattgatattttatgagacataaattttatatgcacatgtaacatttttacttctcataaaaaatgctttggggttgaaattaacttcatttcatgcatagagaaggtcagtattcgaaggtgctagaacaagtaactgctagcaggtatgtgatcctccaaaggtttatgcttttcccattatgacatgtaagtttttatttgcattaagtgtcaggatattagatgtaccattaatcttattttatcatcaacactgatttaccttagttatttttgaaaacaggtatgaattttatctatgaaaagattatatatacaagacacggtgttttatattgtcatactagcaaaattttttctaatgaattagctctttttaaatatacatggattcggtgtggtatctcacacctgtaatcccaacactttgggaggccaaggcgggcggatcacgaggtcaagagatcgagaccatcctggccaatatggtgaaacctcatctctactaaaaatacgaaaattagctggacttggtggcacatgcctgtaatcccagctgctcaggaggctaaggcagaagaatcacttgaacccaggagacagaggttgcactgagccaatatcataccattgcactccatcctgggtgacatagcaagactccatctcaaaaaaaaaaaaaaaattagcaggcgtggtggcgtgcacctatattcacagctacttgggaggctgaggcaggagaatcgcttgaacccgggaggtggaggttgcagtgagccgagatcgtgccactgcagtccagcctggtgagagtgcgagactctgtcttaaaacaaataaacagacaaacatgggatataggattcatgaaatgtttcattagctcttatgcagtgatatgtacatacttcttttcagcctgtgacttcaaccttattttcaggcttttagataatcaaaaaaagtattcatttttgcccacattcaaaatattacatttataatccgagtaactgaaagaatgatgatacaaaatatggttgtatgtagaagaatgaatgattgtagtgttatggttagtatagagttaactgatattcatggaattagaaaaatggatttgttttttaaaatcaataaataaggtcaggtggggtggcttatgcttgtaatcccagcactttgggagatcaaggttgaagaattgcttaaaggcgggagtttgagaccagtctaggcaacaaaggtagacacctgtcactacaaaatataaaaattagccaggcgtggtgacacatgcctgtagtcccagctacttgggaggctgttgtgggaatatggtttgaggccacgagtttgaggctgcagtgatctgtactgcatctgtgatggagccactgtactccagcccaggtgacagagtgagacactgtacttagaattaaaaaaaaaaaattaaaataatcagttttaataagttaaaaaggccatatttctctcttcctctcctctctccagataatgatggtgtatcatttggttgacactatgttttgcttggttttaaaaaaaagtttttaacatttatataaatgatagactaagaaaataaaagtgggaattgtcccatgaaatttctgacacgaagcttggaagatggaaaagcagattgggcctgtagagtaaccctgcatgtgagctcggtgctgctgatgccacttggtggggaaatgtggtagatgggagctgacagtttttttgtttgtttgttttgtttttgagacagagtcttactctgtcgccaggctggagtgcagttgtgtgatcttggctcactgcaacctctgactccctggttcaagtgattctcctgcctcagcctcctgagtagcagggattacaggcacatgccaccacgcccagctgatttttgtatttttagtagagatggggtttcaccatgttgaccaggctggtctcaaactcctgacttcaggtaatccgcccgcctcagcctcccaaagtgccgggattataggcatgagccaccccccaacaagcctttttttttttttttttttttttttttttgagacagtcaggctccgtcacccaggctggagtgtagtggcgtgatctcggttcaccccccctcccaggttcaagtgattctctccctcagcattccaagtagctggaactacaggcgcctgccaccatacccagctaatttttttgtatttttagtagagatggggtttcaccatgttggccaggccagtcttgaacccctgacctcaagtgatccacacaccttggcctcccaaagtgctaggattacaggtttcagcccaccatactgggctgagagttgatagttttaaatgtgcgttacagggccgggcgcagtggctcatgcctgtaatcccagcactttgggaggccgaggtgggcggatcacctgagattgggagttcgagaccagcctgaccaacgtggagaaaccccatctctactaaaaatacaagatcagccaggcatggtggcgcacgcctgtaatcccagctactcgggaggctaaggcaggagaattgcttgaacccaggaggcagaggttgcagtgagccgagatcgcgccattgcactccagcctgggcaacagaatgaaactccatctcaaaaaaaaataaataaattaaaaaaaaataaatgtgcgttacagcttcctaagacatctgttgtggaaaatgacattttaacatggctttcctgctgtacccagttttaatgaatatgactttgtataaagataaatggaaactggaactgacaaatgaaatactggtttgggattgagagcaaaaattcaaagcagttggtaaacctttaacaagataagattcccatcatttcacctttacaattgtcatgatgaaaaatgtattttaaggctggagtcatttcattccctggagaagaaaaaggttcggggatggtggccaaaggatttcagagacctcttgattttcttattcctcctcccacctcacacccctcaagattagagtcggtataatttgcatcacacgtttggagtattcagaataatatttcctgggcccttctccccttctcaagattagaatgtcagcaactgcacacttgacgctgagtagcagggctgcctgtttttaccaccaggatttctttttgctttaaaagcttatcccaaatagtggtttgagggagtcctcacctgcgcacatgcccagagggaaggtctgagagcagtttgaaatacagttctgacatttttgcatggaaatgttgagttccaaatacctcatcagattcagatgaggtgctgacatttattcccctagctatcctttgcacctcatgaaaacgtgatcataatttatttaacaccattgtctcaaaagaaaaagacttaaaatgaacgcagtggacacgccatggtttctgctgttccggaaccaccccatctccccaaattacaggagacaggctcccattcttgaaaaggctttgtctctctggaattttaaaaataaaattcttgcatctgttgacattaactttcaaatgtagaaattgttgttaatattacagacatttagtaaaataattgtgaaaatgcatctcatagaagaaccaaaaaacaaatgtgttttcacttagtagattgttttgtttttttgtgacattgtctgtattggccttgtgtcctcttttcatcaagtccttcacatgtaacaaccccctgaactcgtcaaatattagaatgagaattgatgtatatacaaatgtctgcttagacaagtatctatggtatcgttaactttttctgcacggcggtgttctgaacagctgttttgggtttgagaaatatgattgatatatgccagcacccctgtatagaacctattgaaaaaaaattcagagtaaagtaacattagaagctgaaggtcaaggaaaattcccacaaaataattgtttttggctttaataccttccttaggaattatggttagctatggtttctcctgtgagtcttagaaataatttctatttcctcggaagccaaagatttaccaatattttcaattattctgaaattgtatgtgcaataagatttattggtttttatgatgcagataaataattatatgtcccatctcagccttcaattcaaacttttaaaatgtttggcttaaaaaaagaactctcaagcttctctcttcactgactcattttaaatgccctatataatgtgaacgatctcagttcatctcccgggatcattttaactaacacacattgtgcccttctccattttgatgagtggtaacagccaaagcctcagaagtgcgtttttgttgttacagtcgcttctattctcatcaagtaggtaaggtcaaattatatcgctgtcctgggagtcatccttttcatcacttattgcgtgtctctttgttgggtgagtaactccatttattaaactctggaataatgatttatggaagaaattgtggcattgatgagtgggcattcacttcgagaatcttgatgtgttgggatgttaaaaaggtagcaatcttgttttctcttttgttggcatgtctattcttctgactgctaatgcaactcaggtagaattcacatctcagtgtttaggttctcctttaggaaatactgtgaaaggcctagtggcttgtagtttcttttctttttttttttttcatttttttttaggagaaaaatgaaaaacatctctgatcacttctctagtgtttgtttatgacccctgcctaaaaatgcatggctaattctaggtacttaacagttacaaataagaagccaagacattccaccgaaggcatgggttttagaaaatcacaacagttttgtatcaattagcctacaagcctttgaatcttggatcaatgaaaaatactactttgccaataagatcaattcaatcaaattgagctcttgtgagacacgtccgcaattaactaagatataaggctgagtatggtgcctaagttagagacttgtggaagtccaggtgaatgagaaagtcacagtgctttggcataggggctccagaaagtgcaaaaggccttagaggctaattctgtgggggggaaaaatgagttttcaattctaatgaagattcttctagaaaaatgtgtggatttgaaggcagcatttatttatttacttacttacttacttacttacaagaccgggtctcactctgtcgcccaggctggagtgcagtggcgcaatcttggctcactgcaacctccgcctcccaggttaaagtgattcttctgcctcagcctcctgagtagctggcattacaggcgtatgccacgaagtccagctaatttttgtatttttagtggagacggggtttgagatctgtggggtttcaccatgttggccaggctggtcttgaattcctgacctcaagtgatctgcccacctcagcctcccaaagtgctgggattagaggcatgagccaccgcaccaggccggcagtgtgcatttatgtaattaataattggagtaaaggtaaatgtgtacattttctgggaaggggatatttggcaatggaagctgaggcacactttctctggaataatatagcttcagcctcttgcagatttagtataattagagtcaagggggctgtcagaaaggagatagaactcattccccaatcatggttgacttaacactttgaggaaatgaggtagcaagaatgataagtattttatcaattgttctgaagatcaaagcaatatgatagtttatgattcttgcttataatcccatatgactaatacagtgaagcagaagtcctattaagaactgtagctactgaaaactttgtaacagcatccactcaaattggttttggaataagtagatcatacataaacctctgaaatagcggtagtagattcatttgggttgctgcaatggggaatataattacgtattcaactttttttttttagcaaaaagatgtgcagtccacatgcaaagtgagaacatggtgagaaacgttcagtgtattctgtagaggagtgtggggagccatacttagcacatacagccagcaacaccaaagttgtggtcatcttttgattgaaaaatagccctggcaaaatcataacgagaatagtaacagttttgtgataccttttgtacttttttctttctttcttttttttttttttttgagtcagggtctcacactgtcacccaggctggctggagtgcagtggcatgatcatagctcattgaagtctcaacctcctggactcaagcagtcctcccaccttagcctcccaagtagctgggactatagatgtataccaccacacctagctaattttatgtttttacactagagatgggaggccgggtgcagtggctcatgcctgtaatcccagcactttgggaggctaaggcaggtggatcgcttgaagtcaggagtttgagaccagcctgggcaacgtggtgaaaccctcttagccaggcatggtggcggacgcctgtaatcccagctactcaggaggctgagacaagagaatcgcttcaacctgggaggcagaggttacaatgtgccgagattgcaccattgcactctggcctgagcaacaagagcgaactccatctcaaaaaaacaaaaaaacgaaacagtagggatgggactctctctgtgttgcccaggctggtctcagactgctgggctcaagcgatcctactgccttggcctcccaaaatgctgggattttgctgaccctggctcttttgtattttctagttattctgtttgataactattttctaggcatataccatattctgtatgatgtgttgggtactgaggatacaaaagtgaatagagcacactccctcttgtcaagtcgcttggttggttataacctatttttctcctcaaaaccaacatactcggagatgagcacacattctaacaggaggagtagcccactttggcaagagtaaagaaaaagagatcatggagtcaatattatctggcagaaagtcagctacatggttgacattcctctctgcagggtggacccctgggtccattgaacattgctgagctattggctgaggaagaacatataaccccagcagttataccttcctttaccacctgttaggatttaaaggacaggacatctcacctggcttggcttgggagtagggtagaatcaggtatatctatgtgtctagaaaggttttgtatgacaatacaaaatctgtgaacaggagtatccctttatacataatgagggtgtagaacatagcccaatacaggagagtggactaggggaaaggaaacggtttgtgtggttttatgtgagagggttaggtaactcttgaagttcatgactggaacagacatggacagaaaaaataataaacactacgctcatctgaattctttaagcaaaggaattgggctgggcatggtgactcacgcttgtagtcccagcactttgggaggctgaggcgggcggatcacgaggtcaggagattgaaaccatcctggctaacacggtgaaaccccgtctccactaaaaatacaaaaaattagccgggcgtggtggtgggtgcctgtattcccagctactctggaggctgaggcgagagaatggcgtgaacctgggaggcggagcttgcagtgagcggagatctcgccactgcactctagcctgggcgacagagcaagactctgtctcaaaaaaaaaaaaaaagaaagaagaaaaggaattggaagggtggtagcgcagttgtgtctattaaattcttcttgcacacaggatgttacactatattcatttgagtttcttgatgtttcacttaacaaaagccagattaatttagctttagtagaaaagaaaaacgttgttgtaacggtactaccgggttcttcataacctcaaccagcatcgaaagttaagggaaacaagaactagaaagacattgagaactccagcagtacctccattcagtctctgatttctgctttcttcagggcttctgctttattcttctttcccatgagttgctttctttaatgctctatttccttgttacagtttgtctgactagtgttgctaagttttctttatcatagttctagccacaagtagagatctctctctctgtcctacctccaagttctgtggagagataatctagttggttccacttagatcaaagggtccaaccctgatgtcatcagtggtggctagaaggaggtggtgcagggtgatgacaatgaaggtggctgtggctgtgggtgatagggtggagtcatccaggacacctctgcctccccagggctcactcctttggatgggggttaggtaggtaggtgtgtgggcgggtgatggtatttcccagagaatggagggtaccaccagagcttggataaactggtaccttataagatacataggattaaaaaagactaatacatattgagggtgtaagaaaaataaggtcaattaaataatgatgtaaaagataagcatacagcccatgatccagcttggtttaatgtttcctaatatttaaagcaaaagttgaagtattacttattctgtgatcctgtacttcttttgttttgttttgttcctcaattatttatgatataaaattttcctaggagaccattttcccatgcaggcagtataaaagattttgtattctaagtgaattccaaaacagaagaaaaacttcccatcattttcaagtaaaaagtgattgtatcattctgttgagatggaatgggatcgtagttcatgtgtttaaaggtaacattcaaagggccttaaaaaaaaggactttattttttagagcaatgttaggtttacagaagaattgagtgcaaggtacagaaatgtccttatatccctttcccccacaaacttgcatagcctcctcattaacaacatcccccaccacagtggaacatttgttacagttgatgaacctacatggacacatcatcatcacccagagtccataactgacgtgagggttcacttttggtgttgtacattcaatgggtttggacaaatttataatgaccccattacagtatcagacaatatagtttcactgtcctaaaatcctctgtgttctgtgcattcatccctccatccccttgaatttctgtacctaaaagactatatctgcttacccttgattaagtaatagattctgaaatgctagactctgtcatctcagtattttagtattcgatgtctaggtatttcttcatgaatgaatgcctttggctgtttgtctcattgtgaaaagttgatttgattttaatgtaaatatatccattcctcatcttaataattttttttccaattttaaagcttgataattttttaaaaaatgagcaccaatactgtgagatttcgattcctaacgaaaggccgctgagttgtcattggccttaattgtaactagtattaagtttctttgtatttctattacttatttgtaactgctagatttattttccatagagtttaaagtctttgagttatgagaaatctatatcctcccttttaaattacttaagaataaagcttgtattaaaaccatgtgctagacattttaacttttcctgttgtttaaaaaaggccttcattaaaagttggtacaaagaaagatcttaagctaccctcattcagaatctttcacattcttaatacattgaaagcatttgtcaacacttcattactaacatggaatataagttaatgatgcacaaagtttaaaaccttatattcaattagagaacctattagctttgaaagcagtaaataataattggcatttactgaattttaaacaggatctacatgttacatttttgttttagagtgcatataacattttgcattgtgctgtgaaaacctgatgttttgagaatacagttgccttttagcatttaacctaaagtctcttcctgattttaatgtggaattatttcctccttttaattgctaacatgtttttcaattatttacacacaatttttaaggtgctaattggcactggaatagctgatggaatgtaaactgttggaatcaacattaacttaaagcacatccacagtaaatttttgtatcctggcctggaattgctggcatttgtgcattaaatgcatcactagtctagcagtaaaattcataaaacagcagtaggcggttgtagtatttaccttatcagagcctcaagatgccagccactggatctgctcagcagaattccaaagcatcctttttagtgttgtaaggttgggttaagtgtcttagacctcttttgaacaaaaacattgcttatttatgtgttgagctaatttgatccaagggggttaataaaataaaaacccaaaccattctcctaaaaccccaacattcgattcatgtaagcttttgtatctcacgcttgctttttgttttgtgcttctgttttcatcccgagttgtctttagttgtgatttgctctccttagcatgttccatgagaacccaacatgccagtaccttgcatgtgctgtgctgagcaagacagttttctcatctgtttatccccttttccctctgtgtggttttgctgagaatttgccatttatttatcccataccctaattttacagttattcctccacttggtcatgcaatttctattgtttgttattaataaaagactttcaaaggccttaacttctctgaatctaaaacattgctggcaatcacagtacccaggacatatttttgtgtggcttcttgggttctgctctgtgcactcagattcagagactggggaggaagccttcctttaaccagccctttccatggttctgacctaggaattgtgtttggcaaccaccacagcactcaggtagtcatttccagtgatttccaccactctgaacctggctgctgaccatggaggagactatttcccaggcttggtggatcgatggcgattaacctccgttctgctaagtctctgccaggatgtcacacaggatgtgcctgtccttaagtacaatcacatagtacgttgtttagttcattatgtggcatcattttatagggcatttgagtatttgaagtggctgcttcatctaaggacgaagtcacttcaagttggcattgacgtagtttcagttggtgttactgttatattaggttggtgcaaaagtaattacagttttaaatgcaaaaaccgtaattacttttgtaccaatgtattttgatagtaattttgatattttaagtgtttttttcagtccgtttattaaaggtctcttcaaacttaaaattagtcatggtcataggcagtagttaaaaattagattctggaagagtaaatttagatttttttttttttttgagatggagttttgttcttgttgcccaggctggagtgcaatggtgaggcctcagctcactgtaacctccgcttcctgggttcaaccaattctcctgcttcagcctcctgaatagctgagattacaggcgtgcaccgccatgcctggctaatttttcttttcttatttttagtagagatggtgtttcaccatgttgaccaggctggtctggaactcctgacctcaggtgatccacctgccttggcctcccaaagtgttaggattacaggcgtgagccactactcccagccataaatttagatttaaattatttgtaggctgggtgtggtggctgtctgctgtaatcccagtctttgggaggctgatgtgggaggatcacttgaggccatagtttaactccagcctggatgacatagcatctctacataaagataaaaaaatttagccaagtatggtggcccatgcctgtagtcctagctactagggaggctgaggcaggaggattgctacagccctaagtttgaggctgcagtgctgtgatttaccactgtactccagcttgggtgacagagtgagactctgtctctataataaatgatgattttttttgaagttagatttattttttgaagcactgagtgggaaataggattagaggtctttttagagatgctactgcctaaaacacaattttggacatacactattatgtggaatcttccttttacctcaagtcttgggtagtacttttttgtgtagggtcaagacagacaacctttggcagtgacagtaacactgtgttgctactccagtctatgagattttttttgtctctgcaaaatgcattgactaatcctggtggcttctcctgtgaggtcacagttcctcctacctgtggtgtcatccaatgctctgctttaagagaacctttggggaacacaggctttgctcctctctccttccccatggccacccccagtgcccatcacacgctgcccttacgtcctggcctaaccgcagcctgagctggaacctatgcttaattgctggggaaaccttctgcctctgccgacaccccgttattgcccctgcctggattcttctcgcttagttttggtcccaggcaggagtcggggtgcaggaggctttctgcttggggcagtttctcagccctctccataaacctccagcccaagggctgttgcaattggaatcaaaggtggggtcagtgaactcctaggctctttgaccctgaggtggcctgttagaatctgttatttgtgttcatttgagtgagtggatggactcagtgggtaaagaagtgactctgtatgttgtatatgactttaagttgttgtgatggattggttgagcagtcatgttggttaaaattgactgagtccacaggtagagctggtgatgctggtggctgggcttgctgcatcccaccctgcttcctggaggggctgaacagggcactgcttcgggatatgagcattttcttcttacccctttgacatacggatgtgcaaaattttgtgactttgaactttcatatccaactatgcatagccaagcaatgtgtcctataattcatatgaggtttcattgatcatttcggttgctttgggttactctttttttgcatacattttgcatttacagaattagtgtatttttgtaactggactcaggagagctgggtgaatatgagagaatgtctctactacttatggcattaaaatgacctgcgtaagtggagttcttgctcgtgcttgaaagtgaagggcatatgtaatacgaaacactgtatctgtgatgttttagattgggattgtgcagatgtgtttttttaaaataatgcataggtgaaaaatgagtagattattaaaataatgaaaaacattctgtttttgaagtgaagtcttttaatatcatgcttctgctgttttatttttaaactaatagttaaaagagcacaacgatttctttttttctgggttggaaggaaatcctaattatctccaaatatggagtgacttaaaataagtgagccctgaggaggggaacatttgtttttcttaagcttctgtgaacaatgatttccttgaaaatttttattttgcattctaatgtttttttcaaaaggaaggtgttttttttctaggtggtaaaggttccaatacattaaaggtggccggtaggccaggcgagatggctcatgcctgtaatccaagcactttttgggaggcctagccaggaggatacttgggcttaggagttcgagaccagcctgggcaacatggcaagaccctgtctctactacagatataaaaattagccgggtgtggtggtacacacctgtagtcccagctacctgggaggcagaggtgggtggatcgctggaatccaggactttgaggcagtgatcctaccactgcactccagcctgggtgacagagtgagatcctgtctcaaagataaaaggtggagggcacatggcagtgacccgcctgtctgtggtgacgtgcaaggacggtgtcctcctcaccatgcatgtgtgcatccagccctacctcgcacattcatgtgctccggatgtttgtgaaagaatcaaccagtggaccgtgattcacctcatggagcctgtgagattttcttttaacgtagtcggccaggatgtgagaaggtccagcaaggctcttggtgattaaagcagcatgattcttgttgactggagcttacatttgtatgctggatggtttctgcttgtccagctctctgggcctggtcgtggaggagaattggaaattttgaagggtttagatgcttgtgctgtcatcagaaccttcttaccttctgtgtgctcagagacacacagaccacctcagccacagaaggagacagtgggagagtatgcctcatctaaagacagacatggtgactttacagtttgaaatgaagtttcaatgaaatttattcctgtttgaggatagtagcatgaaaattttaaaaatagtggcaaaacccctccaaatacaactctagccaatgtgtaattgagtgtattttagggtatgttataaatgttttgtcactaaactggtaatcaatgtcatgaaaaaatacaactgcatggatggggtggggctgcagggactggctaacttttgacaaagtgcagaatctcaatggaatcagcagccaaaacaaacaaacaaacaaacaaaaaccagatcccattcttaccttgtgttggtgaattgtgggctactttgtaggacttcagaagagaagagaatctcatctctgtaaagtgaaaacagggactatggataagagaatgtttttacatatttttaatgttggactatgaggtccatcaaaatttaagactttcaaaggaaaaaattatttaaaatagggttttgtacattaattaaataagactgtactgtgggtactctttaaaggcaaccacccaagttctgttgaaacacatacccataatccccacagagctcttctttcagaggatttctcatgggaacaagttctactgctagtagttgaattatctatgttatcacaattgtatgaagaaacatattggatcaagatttctactgtttgcgaaaatatcggctacaaacacacagaaatgcaactgtcgagctctgagttacctgttggttgcagttttgttctcctgctgcagcccactctctggaaatgctggggcagccactgtttgatttgtttggacctggctgatgtaaggtctaagaatggatatacctggattattcctgtccaagtagttgaaagtggactgcttttttagagtgctgaacaggaattgaatttgggacgtgatagagaccaaagaaagacttgtaggaagtgaatgtcatttttgttcaaagtatttgcaaaactaaagccaataaaaggctgccttctcggtggcccttttatttagttcctggctttttccttggaatcagagaaaagtatggcaagtttccccacagaagagagtggaatgtcaaggaagattgttcataaaccacattcattgagtgactgctgtgtttagggtgacattttaatgccagctggtagttaattgcatgctattttatttttttttctgttatcttaaaatatccttcatacgtgaccacgctattttatttattagtttattttattttgagacagagtcttgctctgttgcccaggctgcagtgcagtggtgcaatcttggctcactgcaacctctgctgcctgggttcaagtgattcttgtgcctcgacctcctgagtagctgggactacagtcatgtaccaccatgcctggcttttttttgtgtgtgtgtgtgtttttagtagagttagggttttgccacattgcccaggctagtctctaactcctggcctcaagtgattcacctgcctcagcctcccaatgtgttgggattacaggcatgagccaccacgcccgcctgcccatactattttaaacagtggagaaacttctgtaggaaatgagacggacaaatgaagagagaaagagcctgcctgtgacctacagaaaatggagtttcctggattaattaatgttattgcttacaatgtttgaagtatagcctaactgctataacctaaaaaaatcaaatggaaagactgtgtgcttgatcagtagaagatgagtggcccgaaggtgtccatacctttgtataatttgcttgtcaccatctggttagcttttagagcccattgatgtgcaacaatatttatgacatcatggggaattttttatgttaacacttcataatgtaggctattttttcagtagttatcaacacgtagggccagaatttgctggttaatttaatgcttaaattttttaagcatcatcattgcctgaaatatgtttttttcttttttccatctgtgcagtgcattttttgtcatcattaagcaatagcattttaattggagtcaccacttggtcaatagatgtcaggtcatggcatgggaagaaaaggaaagcgcactcagtgataacctgtcctatcgggaactcacccaagtacttactatccactaccctgccttcagtgatcctttctatgtaatgttaaagttaaacatgtcatttccttacagagcataggagctgtataactcaacgtaataaatctcgacgagttcttggcaatgatgcccatattttatgtgtgctaagattatctctagtcataattatttaatacatatggtatatgtaacatttatagccttcccaaagggaaaaatgatgtggcataattctggcagattgtttatattgttcatgtttaaaatgtattgtaaaaaatgctatgcatgtgattttgaaaccccagtgttctatttttaaatgcttgtatgtctgtaagaaactaagcacagtaagtaatccagtttttaagtatttcctcttgtaaattgctgttaattgctaatgttcattgaattgacctgctaatgggcacaggctgacaaagggagtatccctctagctttttgatgaactgttcaataatgtcagacaatccataaatttgcatgaatgtttaagtttcatcagccgttgtggtctaggcaaatttctgtgttcttattatcaaacattgagaaactaaagtttataaaaaataacttgttagagtgagctaaacatttaagaagtattgcttttgtgtgtttgatgggctaaacaattccttgtcttttcagattatttcatttgtgttctgacagtaataactgtgttttatctggctgtcaggggtccttctagaatggtcctaaattctaatgtgctcattcattgtgtttagcctaaagaatacattaaatagctaaaaaaatttatgaaataataggaaagccagttcggttaattccaatgaaaattaaaactatacatttgtacccagtgaaaccctggaacttattgatgaggtggatattggtaattgctatgatctgcaaagtgctttttttttctttgtataaaagtgtattcatctagtacattcagtattttgcagtagttatttaaattaaaatttgccaggccagcccgggtgacagtgagactcgggtctcaaaaaaaaacaacaacaaaattccacttttttttttttgagacagagtcttgcactgttgcccgggctggtgtgcagtggtacagtctcggctcgctgcaacctctgcctcctgggttcaagtgattctcctacctcagcctcccaagtagctaggcttacaggtgccagccaccatgcccggctaattttttgtatttttagtagaggcggggtttcactatgttggacagactggtctcgaacccctgacattgtgattcacccacctcggcctcccaaagtgctgggattacaggtgtgagccactgtgcccggcctaaaatttgccacattttaactgttaacttcaaaaaaaagagtgttaacttcaaaatgtaagacaacttttcatcatttaaaaaatattaatagttactatatgttggtaatttgttaggttttaaaagtatacaacatatattttatttattgtatttctaatttcattttattataagtatacttttacgttaaagacatgcttatagcgcaagcaattgaaaaacaagtgcaaagcagaaaatacatcccttataattctacagtgttaagtattttatatactatgttaatgttttggtgcctagttttgcctttctatgcctatggatatatattttaataactacataggttttaattaaaatggttataaaggccaggtgcagtggctcacatctgtaatcccagcacttggggaagccgaggtgggcagattgcctgaggtcagaagttcgagaccagtctggccaacatggtgaaaccccgtctctaataaaaatacaaaaaaaattagccgggcgtcgtggcaggtacctgtaatcccagttactctagaggctgaggcaggggaattgcttgaaccagggaggtggagattgcagtgagccgagattgtgccattgcactccagcctgggcgacagagcgagactccatctcaaaaaaaggatataaagtcgtttgtttaattagtctcctcttctgtatgtttaagggtgttttaaatgatttttttgtaaggcagttataatattttttctgtcaatgtccatgtcaacaaatttcttactgataccatgtccaaatgtttatatctgttgacaagtgctttggggcagtgctggtgtttggccctaacaccggagtttgagggagatgttactttgaaaactctactcccaggttatctgttaagttcttaaccatctgaccttgctctttagatttggaatgttgaagttttggtttgagatgaaccagttgtggaaatttgcatgatgctggaacaggtgatcaggttgcaaagatcaggtaaggtgggttttgtaggttattgttgagtcaggtaattaaataaaaatctgatgaaagaggaatcaaatagccattaacacccttcctattttttgaagagggaacagcattatgcatgttgggttttgaagctcatgtgatagaagactgaaattatgtcttgacagaaccccttttttcctaaattctttggcaatttattgagtgcacgaactcaatacaggtactatgagagcagaaagtgttcttgcctgtggcttgtagtagtggttagtggtgggctttatattaccttttagtgtctctgcttcatggcttaacttcactaagcaagaggtgctccagtgtaaatgagaataatagttactacatcctaacattactgtaagaattaaacaaaatgaatttatggatgtcacttggtacagcaagtcttcatagatactgtagtttttctttgttcttgtcctttattctcaaattgtcatctctataaggttaggacagagtttcccaaacttgagttggtattacagatttctggactccagccccagagtttctgattcagcaggactgatggggcctgaatatttacatttctaacagttcccaggtgatgctggtgctactgggagggaccacactttgagaaactctgggttaatgtattataaaggcaggtgttattttgagccaatacattatgtaaccctttctttttaaaccccctgagtaaatagcatttaagatgggcaaacttgatattatatagtgccatatgccccaagcagttaaatttgaattgttttttattattaaggaaatttagagctagaatgacctagttatttcagaaatagaatgatttagatttttgaggattttgatagcatctaagtatatacctataatattggcttaattttaatgaaagttgttaaataaacattttccttgaatgtggacactacttatgtttctagtgaattttattcacttaaacatttttttccaaaaattttaagtgttaatagatgcagaattcaaaaagaaaagttaggctaggatccttttaaatttattttatagctccctgtgaaagatctgcagaaactgagctccttttaacgtcatgatttttaccacatgttgaagataactagaattgtcaaccaagtcttgttgtgagttgccagtgatctgccatcatctgtgagaattaagcttcactaatgtaattttcttgatgagtgccagacaggagcaggtaccgaatatatggtgttgacatacttaatttagtgctctttccacaaagctattacattgactattaattggccttctgataaaatttcagcttaatgcaaatgatgacaaaaggcatcctaggatactggctgctgcttctgaaattattcacatgccctgagatctcattagtgacagtgcacatacccacttttctttggaatgtaattagggttcttttaaatataatggctaacatttagactgtgatttaaaaaaatatttttgacaaaacctctaacttaagactttgtagtttgttcttctgttgtatagttgcacatcttccatagtttgaaaagcaaagaggagcttatgttccattcttcacactctctggttttccattatattggccttgcctgggaacaggttgcacaagaaaagttcaacaagaactttaagttgcgttttggtttattgaagtatgcatggtgaacagcaagtagatttctgtcttttcatggtttggtctttttttcttcttcttttcagttttcagtcctcttctcatttattagcttatattttaggattttgcaaaatgttattcttttatttatgttaaatagaaacatgagaaaatcctttgttttttaatttttattttttggagacagggttttgctctgacgcccaggctagagtgcagtgggacgattatggctcatggtagcctcaaccttctaggctccagggttcctcccacctcagcctcctgagtagctgggaccctgatgtctggctaattgcttttttttcccctaaattggaaaaaaaaaagcctttaaaaaaagtcagaatattccttatggatccaaaccaagttcatggatgcaaataaatgttgagttatttggacactttcatatcatcttagaattttttaagtcaatcctaacatctaactcttgagcatgttctcatggcctgagtgagaattgtcttatcattaaagttcttgtgtgaaaatagtgacgtttaaacaaaaattctggaaaatagtgaatttattcacaatatgtagatcacaggaatgtatcattttctggtaagtgatgtataaatgatgatgccttgttccatctttttaaaattgtatgacacaatgctttatgcttttttttagttttacagttctctgcaatgagcacctatgatattttataatcagaagaaaattatttgtaaccatgttttaacaatgcccattaagaggctactgttacacttactttgtaaatattatcagattttgcttaaggcaatgcacatataaatccatatatgttctacaggagtgatcaccagatgggatgaagtatagggtcagttagtggcctttaactttttggttgtctcctataatggggtttctcagcatctgcataaatgacattttggactggattattctttgttgtgtgggactgtcctgtgtattgaggatgttttgcagtttccctgacctatactgtttagaggtcaataatattgaccccagttatgacaaccaaatatgtctcacacactgccagtgtcccctgggggcaaaattgcccctcattgagaatcactacgctagagtaaaaaatacatttcacttggcagcccagtgggtaaatgcaagcgtgtgtgtgtgtgcacacacacacacacacacacacacacacacacacaccccaaacaaccttactgctttgtaagtgtacattgatatttcctattttattttgttccattctattcattccatatcattttctttaaaaatgtttgtgaggatatttttctgaatagggtggttcctgtgacagttagtcttcactttaaaatgtgcataggccaggggcggtgttgcttgcctgtgtctcagctactcgggaggctgaggctggaggactgcttgagcccaggacttcaaggctgcagggagccatgatcatgccactgcactccagcctgggccacagagtgagaccctgtcccaccttcccacccaaaaaacgtatgtgggttaaagatgagctgttttgactctatgtgggtttgcttacagcgaggcataccaagattaaagaatactgcttattctgggttctctgtggatgggatgtgtactgatgaatacatataatattggcttaattttaatgaaagttgttaaataaatgttgttttccttggatgtggacactgcatttgtggacacttaaaaattagctgcagtttaggcaccagcacttcccaggggcctcctccctataatctgacacatcacacacaaggcagattctctgaggtgtggtctaaacatgagcaggagacaaaggttgtgctgttagcatgaaaaggttgtgccttcttgggcttcagggttttgtacaaggttgagatggaaggctgcctatgaattcagaattcatatacagaagattcatatagaatgagagagttttgttgtcccttcaggaatatagattgtatcttggggcagatggctttatgtgtctcatactgcagattcgagagatttaaattttcatttctctaaaggaaacatttatagttctcagttcttaagcacactggaagttcttcccttctctttgcatttgtgtttcttatacaaataccatgtgtgaaatatcagttatactgcatttatgtacaggatgaaggtttctccctagggaataaataaaccatcctccatgtgcctcattaaaaagataggaaaagaaacgtggctttgtcttctaaaaatcagtcacaattttctatattgcatttcatggtatggctttatggaatatttttattatttaattttttgaatggctttttgtttttgctttaaaattttacttatatcttaaattaaggatgctggatcttgaaaaagttgctatggtgactatatacttaagcttgatgtctccaattcagaaatgggtcattgttctaaaacttcattgtaaaatctgttacttggaactttattttctcatggaaacaatattgcaagtaatagattccagactcaataaaaataacttatttaaatcagaaagtaaaaagattacacccccggtcccctccgagacaggatctcactctgttgcccagtctggaacacagtggcatggtcatggctcactgtagcctcgagcttcccaggctcaggtgatcttcccacctcagtctttcgactagttgagactacaggcaaatggccaccacgcctggctaatatttctatttttgtttgtttgtttgtttttgtagagacagtatcttgctgtattgtccagactggtctcctgtctcccgggcccaagccatctgctgagcgggcagctcagcctccctaagtcctgggattacaggtgtgagccacaatgcctggccaagtaaaggaaacattgtatacttatatctttgtatttatactggagtagtctccccgccatccaccttccttccttccatgaattctcatgctagaacacgaggtatagcagatactatgtttggcattttttttttttttaatatagtgtgttgtgaaccacagggagctttggaggatttgttcattccctgaatagatatttactctgtacctactatgtgcaagacactgttctaggtcctggggatgcagcagagcaatcctgctctaatgcgtgctgttgtttgacagcataacctgtaattgaatgtcctgggaagcaggaggcaggcagcatgaagaagccttagagctgcctgcagctgagggccacgaccctgggaaaggacacggtggctcctgaggcttctgttccagggactctgactccccattccgccctgcacacttggtgtggttttctagaactcctttttgaaataggaagatctggaaggtagtcgcgtatggtttcaagagagcttaaagtgacagtgtgttagtaaaatgtttcacaaccactctcagctgaggctgaaggagtggggactgatttgtagtgtttgccaatttctttggtgtacacactcccgccctggcctatttcaggaagccaatgggatgtccctgagtgtggagttggaaaacacaccatcatacacttttacatagtgtttccactgtgtagatacagcagacctaggacaatccaaggccacacagagtagtaaaatgcaacacagatgataggaagttttactttctttttgagacggagtctcgctgtgtcaccgaaactggagtgcagtgtcgtgatctcggctcactgcaacctctgcctcccaggttcaagcgattctccctgcctaagccttcagagtagctgggattacaggtgcccgccaccacacctggctaatttttgtatttttagtagagagggggttttgccatgttggtctcaaactcctgaccttaggtgatctgcccgccttggcttcccaaagtgctggaaatacaggcgtgagccactgcgcctggctgagttttacttatttattactctgctttttaatttatttaactgtaagtttatatatcttaatttttaaatgatgaaggtggtaataactggcttgcaaaattcctgaaaacttaagagtcctcatgagctagtcttcactggctccagcatctgggagcaccacaatactttacctaaaatcattatggctggatgttagaatactgagttgttcagattttaggcaggtaatatggaatatgtgtcataagatgtaacacctcctgtgatgtctgaggcaggaccctgtagtcaaaattttggtatttctgtagcaaaatgtgaatattcaccaagtaaataaatactacaaataatcttggattggttcagagttgcttttgccaccaaatgtacttctaacaaacttatgaaaaatttttcattttgagagtcatttgattttggaattgtggacaaggcatcatgaatctgtgtcattgtgtttgcaagtcacggttggtgttccaggtctagaagaaactgtgtgtttgctttctcacaatgagaaggagaagaaactcagcatgatctcctacttggatcattggtgccctgccggagcggcgcctcacccctgcgtttctgcagcctcttcttcctagaaggctcctgtcccggtgactcttcctgtacttcattctttctgcccagctcgtctggcctccactcctcaccaagtgcttcatgcaagattgatctgatttttcttttcactccctcggttggtgtgcagcccccgagcacatacttgaaagagtgaagtgaaacttacagccacctctgaataaacatcccagcagtggaactgcatgtcccaaagtgcttgaaatcttggcttctgtgtcttggcaaagcttattttctttcaatttctatgattcagacaggttgcaatctagtcagtcattacccacatctttctacacctattgtagcctgtttatcagcgaatgtatctctgaaggatttcagctggtaaatttgcattagggacagaggcagttgagccagtgtctcccagagtggtcatacgtgctaggtgctctgatttcttgatgttcctgttgtttttaagatctcacatggaatatttgatgctaggaaccctaacttaccgaattcagaggtttttcttcagtattactttttatgagtgggaaactataaagattacattttatttatttatttatttttgagacggagtctcgctcttgtcacccaggctggagtgcagtggcggatctcggctaaacaattcacagtcttgtgcaatattctgttttgttcatttattacacttaggatgaagtgtcacactttgtgaggtgatttttttcccttgtcatttgccacttgcctaagtgtacttcgctgtctgacagtactgaatcaggtcagtttttaggtggcagcaatttataaataaccttctctttccaaagaagaagcaacagcttattagtggtttgtttatgaagcttgcttttagttttaggcagcctggatgttaattgtctaatcagagttgtgtttcaccataaacactaatgtggtcagtgtttgagtttctgtttctctttcttggactggtattgaaagacataactgattttagatgtctaagcaatggcttttctttgtatttgctgtcatgtctccttattaccatggtctgtggggactggtgtatgaaagtgattttattgtcagagtggcttccagttcttggggcattaagacatttccagtaatttctgtggttgcagagataaagttgttagtgggaagtgtggaccccagtgtagtcaaggtctgggttggttggacttcgaatctgtgaacacccattgtctccttggctttggcagatgcatcctggttgctccttttgtagtactgctcttatttccttctgtgtcattggctctctcattcttcaccagaaattgttttttcattttgtttttaattttctttacccagaatataactcaattcagaattgactaggtcttcaagagaaggaatcaaaaagttagaatacgggccagacgtggtggctcatcccagtgctttgggaggccaaggtgggaggatcacctgaagtcaggaattttgagatcagcctaggcaatacattgagaccctgtctctacagaaaattaaaacataagccaggtgtggtgacacgcacctgtagtcaaagctactctggaggctgaggtgagaggatcgtttgagtccaggagtttgaggttgcagtgagcttagttacacccattgcactacagccaggatgacagagcaagaccttgtgtcttaacagaaaaacaaaacttagaagttgcttcctgttatatttctaactttgaccccaattaagtttatcactgaagccctaatttttctttcgctcagttacccacctaggggcctcatcactttttctttcagtcttttggtcatgaatatcaaaaatttaatgttttaaattaattatgtcccatccaaggtgttgactgtgttgacttctgcttagaagagcagggtgatgagtcaaggccactgtgccaacccaaagggacaggaggtaccactgtaaaggttcaaccaagaatggtgagaaccataattcaagacttcacactggtgattgtattctggtgtggacactgtccacactaaagattgtgagatgttttcaggaccttctacaagaaaacgtgatggtttttgggaaataatgattcagtacttgtaatatctttatataggttttaaatagtgtttccttgtaatatctttatataggttttaaatagtgtttttagaaaactgagagattaaagataagagcttaggccttttcccacttggatacttgacatgttgtttacagtctttgaaacatgttggtattgtaaagcagtactgctagcactgttacttctttcatagatgtttggggtgattattaatggagacttagtttttctccaaattttcttctgttcagtgaagtcactgtagtcactgtagatttgaagatataacaacattaaatgatttaagtactttttatatgcatatttgagggagtgagtaaaactattagaatattaaaaattttttttttgttatactgaagtcctacaagtggctccaatgtgtggaagcgtaggtgttgagtagaggtcaaggtgaatggtgggagagacaccaaagtctttcaacgagagttttgaattggtgatgaatcagtggtgaagaacttgggattatttttggaatgttttatcagctcttgattgacagaatacactctcgttctcagttttttttaacaacactattaataacagtactgactagatttattactaaaaaccagctcgggtgtttgtccagtaagtttactgtctttgaaggaaaagcatttttgtaccaacaaaattttgagcattgacatggagttaattataatcagatttggctttttaaagcctaactatttttttttttttaaagataattgtgggttaaacattaatttaaaactgtcttggccaggcagggtggctcacgcctgtaatcccagcactttggaaggctgaggctggtggaccacctgatgtcaggagttgaagaccagcctggccaacatggtgaaaccctgtctctactaaaaatacaaaaattagccaggtggtaatggtgcacgcctgtaatcccagctgaggcaggagaatcacttgagcctgggagatggaggttgcagtgagctaagattgcgccactgcactccagcctgggcgacagagtgagactatctcaaaaaaagaaacaaaaccccaaaacatatcttactttaatattgctctgttttaatttgtgttactgttcttcgtcatggaagatgctgaaatactctcgtctcattgcatgaactgtctggtatccgttttgacttccctgtttccctttgtgtcttagatgggggattttcaggcacaccaagacagcgttctctgatggcgataagccctttgatcttttccccaatacttaacactttttgctaatgtgttagaagaatttcttctttccattctcctaatctcttcctgcttctacccatgccaatatacttcctcaagacatatggggattaaaacgtaggaatattcaaagcagctacttatacagagttttatgtagattgttacataatttttttgttgcacttaatattattcttaaaccctgggtatcctgctcaggactacaatttgtctgcaaaatagacaaaataggatgattcattttttgagacaaggtcttgctctgtcacccaggctagagtgcagtggcatgatcttggcccactgtaacctctgcctcccaggttcaagcaattcccctgcctcagcctcctgagaagctgagattacaggcatgcaccatcatgcttggctaatttttgtattttttagtagagacatggttttgccatgttggccaggctagtcttgaattcctgacctcaagtgatcccccaacctcggcctcccaaagtgctaggattacaggtgtgagccaccatgcctggccctaaattaggatgatactaatgatagcaacaacaacatcaaccaccgtccctactgttctgcagccgctggaccttgggctcacttgctttgtgcctgtgattttgttcactgtctgcatatacaggcacatttgctcataatgacctcagaagtttatggcaacttcctgtggttggcattgtagccctcttcatttattagacgaacagaaactgaggcactgagagctcatgtgacccattcaatgtcacccactagtcagtgaaaatgtgtggatttgaatctttgtcttctgacctccagggctgccccctcaaatttctcctgccgctcttcagcctgagaggcacgcccgtcctttggagtggaactcacctctttccattgacttgacccagacagactcctcctgtctgcatttccacagcattcacattccttctgggtctttttttttttttgagatggagtctcgctctgtcacccaggctggagtgcagtggcacaatctctgctcactgcaagctctgcctcccaggttcatgccattctcctgcctcagcctcccgagtagctgggactacaggcgcccgccaccatgcccggctaattttttccttctgggtcttaagacctcctcacactgatacttgttgccttacaagtagacctgcctccaaaagttaacccgttggctatgtggaaattgaagtgcagcctttcatggaaatgggggtgtttattatctcttgccgacgtactgaatgctttctagagctgaaatatttttgccaacagatagaattgcaaaggactgttttgccatttctagtggatgtagatgtttagggcaaatggtgttaatccaaggagtaacagtgtacttttgggtcaatagtctgtttttttttgttgtttttttagatggagtcttgctctgtcacccaggctggagtgcagtggtgcgatcttggctcactgtaacctccgcctcccaggttcaagcgattcttctctcagcctcctgagtagctgggattacaggcatgtgtcaccatgcctggctgatttttgtattttttagtagagatggggtttcaccatgttgtccgggctggtcacaaactcctgagctcaagtgatctgcctgccttggtcccccaaagttctgggattataggtgtgagccaccgcaccctgcctgcaatcatatttttggtattctcatgttataattctcttatagttgatatagagtgattgaatattgcttttttaaaaaaatattttcaacttttattttggattcaggagatatatgtgcaggtttgttgcatggatatattgcgttatgttgaggtttggggtatggatgatcccgcaatccaggtagtgagcatagtacccagtaggtagttcttcagcgcatgtccttttcccttcctccctcttctagtagtgttcagtgtctattgttcccatctttatgtccaggtgtacttaaaacattgtttacttttaggttctgccttcgtacatttatatggtcatttactgaataacaatattttggtcaatattgcattgcatataggatgatggtcccataagattataatcccatattcttattgtactttttctttggttagatacgtttagatatacaaatacttaccattgtgtttcagttgcatagggcattcagtacagtgacatcttgtacaggtttgtatcctaggagcaaataggctgtaacataatagcttaggtgtgtaatagggtatacctccaggtttatgtaatatactctatgatgttcacacaacaatgaaatcacctaaccagaatgtatccctgttgttaagtgacatgactgtatcataaagtagaaaaatggagtagaacaactggaagagatctttcagtgtaaaaatagagttagaagatattcagaagaaattcacactctgctaatatgtaactttgtagtgtcagagtgatgtcatagaattgaggaaatgctcattgatatttaagtgaatgttagaaaatgtactttttcttctaatttctcatagaacaaggatctatgaatctgccgaaagtatatccagaacgaaacaactctgtgcatgtttttatggagaaagttcatttgtagctttattagattaacaaagtgttctataagcagcacttcacacagttcacaccatgtggcacatagcgggcacatggtgtgaacaaaagaataaatataaagaaaacacgtgatgagcccagccttataagctggtgcaaagttgtctactcagaaataatagttaaaaagtatagttgacccttgaacaacttgtgtttgaactgcttgggtgtacatatgcatggatctttttcagtaagtatattggaaaaatttttggagatttggcatgttaaaaattttagatgaactatgtagcgagataaggaaaaaaatttaaaaatatatgtcatgaatgtgtaaaatatatatatagataccctgtcatttacaaccataaaatatacaaaaatctgttacaagaagttaaaatttatcaaaacgtccatatacacagagcatacgtggtgccattcacagttgagagaaatgtaagtaaccataaagatgcaatattaaatcgcaactgcataaaattaactgtagcacagactgcactactatagtaatatcatagccccctcctgttgttacttgcagtgagctcgagtgttgtgcgtgtctgcttaaagtgcagtgtgatgctcatcatctccttgtgagcaatttgtcttcccaggaaattgcatatcacaataaaaagtaattgctcttggttctcatgcatttttcatcatgtttaatatgaaactgtaaaccttgaataacgccaagggacccatgtgaagtgccactagtgatgctggaaatgctcccaaaaaaggagagaaaagtcatgacattagaacaaagagttgatatgtaccatagattgaagtctgcagctactgcagttgcccaccatgtcaagataaatgaatccagtgtagggaccattataaaaaacaagaaaggaaattcctgaagccgttgctgcaggtatgccagcaggcacaaaaaccttgtacttttgtgaaataccttttcatctcatattgaaaatgcggcttttatgtggatgcaggatggttaaaggaaaagcacctattgactaatatgatttgagaaaaagtaatgtcattacatggcaagttaaagcaacaagaagctgaaggatttaaagctggagaatttaatgccagcaaaggatggtttgataattttttaaagaggcttggcttaaaaaaatgttcagctaacagaagtattaataacttctgccaaccaagaggcagcagacgagtttccagatgcacaatcattgaggagaaagagtgtctgcctaaacacggttttaatgcagacgaaagtgctggaaaaaatgccagcaaaagatatttattagtaaggaaaaggatcaagcactaggatttaagtccagaagagataggctaactcaattgtattgagcagaggcagtcaggactgccctcatctacaaagctgctaacccctgagccttgaaaggaaaagataaacaccagctgccaatcttttgattgcacaacataaaggcctggacactgggaacacttttccagattgttctattgatactttgtccctgaagacaggaagtaccttgccagtaagggactgtcgccttttaaagttcttttgatattgaccaacgcccctggctacccagagccccaggagttcaaggcgttgaagtagtctagttgcctcaaacacaatggctctaatttagacctgtaaggctcattacacacagtaccctttggaaaggatggtcgttactatggaagggaccactgatagaacattattatgaaagtctggaagaattaccaatgaaggtgccttccttgtgatagaaatatcgtgaaagccagtaaatcccaaataacaaattcttgctggagacaactgggtccagatattgtgaatgacttcacaaaattgacaacaaagccagttaaggaaatcattaaagagattgtggatatggccaaaaaagtgggggatgaaggacttcaagatatcagtctcagagaaattcaggagctcatagataccacagcttaggaattaatagaaaataacttgatggagatgagtatttccgaaccagtgcctgatcatgaggaagaagacagagacgaagcagtgccagaaaaccaaaattacaccatctgacagaagggttctgattattcaagactatttttgacttcttttataatatggacccttctgtgatatgtgtactgtaattaaatcgaacagtggaagaagggttggtattgtatggaaatatttttagagaaaaaaaacagaaaaagtcagacattgtgatgtatttctgtaaagtgacacagtggtgcctgtctctcctgcctccctttccaccttctccacttcttctgcctctgccacccctgagacagcaagaccaacccctcctcttcttcctcatgaagatgatgacgatgaagacctttatgatggtccacttccacttaatgattattaaatatattttctgccaggcatggtggcttaggcctataatcccagcactttgggaggctgaggcaggaggatcacttgaggtcaggagtttgagaccagcctggtcaacactgtgaaactccgtctctactaaaaatacaaaaattagccgggcttggtggtgcacacctgtaatcccagcttcacaggaggctgaggcaggggaattggcttgaacctgggaggtggaggttgcagtgagccaagattgcaccactgcactccagcctgggtgacagaacaagactccatctcaaaaaaaaaagtaaagtaaaaaatatattctttgccttatgattttcttaataatattttcatttctctaggtttactttattataagaattcagtgtggaatacatataacacacaaaataggtgttaactgtttcatgatagtggctaggcttccagtcaacagtaggctttggtagttaagtttttggtgagtcaaaagttatactcagatttcgactgtgtggggggtttgcatccctgcattgttctagggtcacctgtttaatagcactggggtgataatgcacatgtgtccttgttagagaaagagctcatgggcctccttgtggtgttgagtactgctgatccagctattccatgctacttttctttccctagttttgtgaaaccctgtttccttgattttatttatattctttagtcagttctcaaaatcctttgaaagtggtttggaggaagggaagaggaacctgcaatctcagcagttacccaggtttgagttctgatttccatgggtgatccgcattcagattggatgaaacctgtggcttcaattgtacctaagtgtggacggcacccaattacaagtagttagcctcgaactcttttttgtaccatggactcccatctccagttgtgtcccaggaactggctgagagcatgtgatagttttccctgtaactgaatgcatcatcttttgtttttgtttgtccttgtgcctgtcctctgcccaaccacccaaatgacaaacctagacacctaaaatctgtcattttccttcataatggcacccatccaccacataccaagtccttttaaataagtctccattctgcatttgaataattatacatcctgattgtcttttcaccacctttccattagccttggccctcatgacttcttcattattagactaatgagctacgagtgtttaccctcctagtccttctccataccccttgaaacctcgtgcagaataaatgcaagttaaactgctgtgtgttaatgacaccccgcagttttcaggataaagtctatatggcttaacttagttgtctttcatcttcccctcttgattacctcagtctcttgaaactttctcaaatattagtaacatttcttaaaaacttgctacttacaggaaacatcctaagcaatttgtcataatcaaatgaaatttatggggaaaaaacaaaacaaaacaaaacaaaacaaaacctatcactactgagcccagaggagtgaagaagttacctagggccacgcagctggtgagttgtttgaggctgactcatcttgagagctcattcatgattagcaaccttgtggtggtagaatgagtggaattcctggcaaaccgcaggataaagtgtctccatctccattattctgggtcacttgtgtggacgttgtcttgggaagcaaatgaaggcaagtagagggtttggctttccttagaatagattttctttaaaacttaaaatttttaaactctttgtgcttgactaagtccattagatggcactagtatttaccttccagaagattggcattaaatttcagtattaaagcaatttgtggattgggggaaatatttaacttgcaagttatttcttttacctgtcaaatatgggagtgaaaagatgggcacacaatatttattctgtgttcagttttttaaaaacattgctaaacaggttatactaatgaagagttgataaaaagaattttattatttagttactttttgaataaacctgccagttgattaaaatgagcctaatttaatcagtattgtattgcatactgaagataatttaggctaatgtcaaggacaccgttatctctcctttgtagaaggtgttgaaataatgagagtagcaaaaaaggagtcagaaaatgaagtttttcatctttgcccctgggtgggtatttaaaaatcacacccttccttcttgcatgcaaattaaactgaaagtcattttgtactgtaatattaaccttacattttacaaaataaatttattgaactttgatcttttgctaatattggtttgtggttgtcagaatgaatttgaggttttcattgtgtgtcattttcacctggactttcattcagaacttgaagtgaacagaagtggtgggtttgatatatcttaatttgaaaataaatcactgttaagcagcaactcctagttctactttcttctttttttctgaatcacttttttcttctctatctaccctccccactccagcccatgtcttaatagaatcatctgaattcctttcttcctttaaagtagttaaacggccctcagtttttcttgtgatgcttttagatggaagctaagtcattgctgaggttcttgttcaaattgtgaagtcagcaggtaaagggattatgaactcccaagtgagtcccctatacaaagggcaggttgccttggaaacaaggctagttcttagagttggaaataccatcttgtctttaaatgccagggctggtgatgtgctgacccctgctgcatcatctctagacctaacattgtgtggagaagttttccatgactttgtgcaaattgcttaactgcttcccagttctgattgattggccaaagccacagccaagttttcttttctagtgcttctcattttaaatataatttgcaaaatttaggactaaggaagtgatccttcaagtttctattttagaatgaaaagttttccactactgattgccaaaaaataaagtatagagtttaccagatggcaagacattttagtgatgagtcattttttacaagttcaacaatggaatgagtgatgcgttaaggaagcccaacgagggaatgtctcggttctgtgagatggtattacttgatggtagagacggaattacccttgtttctgacgacactggatatgaactgtagcagggagctcaacggtacaagttggtaggaggaggcagttgtagcttaagtgggactcctactttccctgcatctaaacattcgtaacttgctggtggcacagcaggaggagggtttgagggtggtgtgtgggtatggagacaagggctccccacccgtggaaccaagccctggtttactatatccagctagctgaagaggtaaaaagactagaaagaaagggccttcctaactaaagatctcagctctgaaagactagaaaggaagggccttcccactaaggatctcagctctgtttttgtggactcaccagtggatgcagacattcagaggagcaggagagcagggcatgctcctgcctggtcgtgactgtcctgctatgtttctgggttgtgcattcacattggcagcttttcatgccctgggactattacagcgtagggactgggggagatttcaggatgtgacttatgcctgggagtgaagggagtggtgtttagtggagattaggaagaagatggaaagtatttcacccccagttgcttgctcactaacgtttaacattgtgattggtgctgtgggttttggtggtggttgtcttttaattacagtttagagaggctgtgtgtgtgtctgtgtatgagagaaagagagattttggtttatctcgttaagacctatctatttcctacatggtgttggattttttttttttttttttttttttttgatacggagtctctctctgccaccaggctgaagtgcagtggtgcgatcttggctcaccgcaacctccatctcccacgttcaagcgattccccttgcctcagcctcccgagtagctgagactgcaggtgtgtgccaccacgcccagctaatttttgtatttttagtagagacgaggtttcaccatgttggccaggatggtctccatctcttgacctcatgatctacctacctctacctcccaaagtgctggaattacaggcatgacccaccatgcctggtggacttttgattaataaaaatattttggccgggcacagaggctcacgcctcttagaaaaaaaaaatcttttttttttcttttaagcaaaatccctactgcagactgtgttgttaatttaaagagttactattgagggattctcttatttatcatttgttaatgcaggcatttctggatacacgtaaacatatgaattgtcaagctaaattgttcacagattagaacactatgctgttgacccctgtttccacgttactccctcttagatatgttggaaggttggcagagtggcaaggctggaacatatacccataggtgaggtactgctctaatatcacaaaccatggggctagagcctgagacgggtttgaggtcaagtttcctggtactgtgtacgagaaagtctatccacactttgccattcttggcttagccagtaggaacattcgctagtctttaatgtgctcatggtattttagtgttcttttctaagttttaggtcttttttatcagacagtatatacccttcttaatatgctgatgaagcgtggaattaatctcacatgcataacatttaaagttttccagtggcaagcttaagattcttgttctgtagcgagtttttattggtatagtttgtattactatgattacaaaacatcattggttcaaatatatccttttgcttactcgtccagttaaacactagctctatttaaatgagtttttaatgaaccatgctagcaagtaaggctcagagaatgattaaggatttagtattgtctctgtgtcattaaagtaaattcagtcatcagaaagcttacaaattgatttttagttccctttttgttgtgtctacgtaataattagttactacatcatcgcatttgcttctgagattattcatcttgcccatttgccagtcttaccatgttctctttgagggaacactgcatgtgttcatgataaaatcacaactcgtgccacttcctccagtttggagtcaacctatctgtatgtgattagcccatttctgaattattttgttctgtcttactgtgctatcctactttttattaatacttaagcagtagtgttatgtagttgtaacctcatgggtggataccagtgtaacagtggcactcatgatagagagtagagcaagaggggtttatattatatttggcaggtgggtcagttagctgatggctatacgaatttgcatattttcattgtggtttgtggttgacatactcaaggctattagttgaacataagtcttaaactgggaatctaattagtctgaaggctcagtgggtgatagactatgtcaccctgagggacaacagaattaaatttcagctctgaaatgtaagcatcagggctagggagtatcataggtgaatatctttcactgtggtttccagatgcagtggaatatctctattaggcatgagtgttcaagaaatactttcttcttaaaggatggcattagctcttgtcggacaggtctccctttggcaattgacagatagaagcttatgatgatggtggtctcctgtgttgttcaggaagcagcgggaatgttctgccctctcctgcatgatattttgctggaaatggctttattaaagattgatctcatttagctccctttcttatgttggataatacactgtgataatctacaaaagcatgttagtgtttggttagtttttcttttatgtaagtgccacaggttatcacgtgtgctttatgggagacaagtgtaaatgaaatcttaaaaaaaaataagagatagaaaaaggggaattcagaaactcaaatacttgatctaatttataatttttttggacatccttgagtgaaagggcagaagaatttaaatgtattggtaggtatgatcctaattatagaaatctataatttataaactatggagacgaaaagtgatttttgaattagtgatagtttagaattatacatcatggaacagcctgacttcaaacttaaaaaatgcatgtatctccaactcctttagttttattgttaagtttttgaaatttatttcattatgctctagttctcccatatctgttgaattttctttctattctcttctgttacattcttctttataggcacatctgcccatgacatctccctgtcatctctcaaacacgcactttctgtgttgtgcttcttgttgactaagccgctggatctggcttgactcatggaggctgctcatgtttcttagatgaagagagggtcatggaggcatcttcaagtttattcttgtttctagtattctccaacatgttttgtactttatccagggccaaaatatgatgcctttttaaaagaattataagtctttatttcataggaaaacaattgcatatattgacattgagtgtccaatgacacccatcataattgactttccctggatatgtctagcttatacatgaagaaagcaatggaaagtgagagattgctcacagggtgtcacattaaaatggcttctcagggtgtgtggagtttgaacctagaggtctttgagatttcacttagacttggcttaaatcagctttcattttcctgtatgagggtagaatctgcaagttctttgatccttttaagccctctgtttaagactgagtgatggcaccagcaggatgaattgtctgtgatgatcttcattaccctcagatatgttcagaaaaattttaagtggtgtcatcaaaattgcattaatttggtaaaggcaggttattacgtttgattaatcaaaaacgaacagaatcctattcagaggtctgcagataatcttagtttgtagcctgccagtgccctgtgctgtggatatgttagatgctccagagcaggaagatttggagaaaataggatctttgacttgatttcccatctcaaatttattctgtatttatttatatgctagtcagattcatctctctgaggctcggctttgcttcctgttaagtgaaataataaaaacgactttgtgtttctgtggggccctctagaggaggatgtagagcgtctgtggaaggtcttcattttgtgccatatctatgttgaacatgcattttctagcatgctgtcttctttccgtgttctttttcccattactattcctgtgtagatccaagacacagcgattgagctttgcatctgtcttctttactcttgaaactattctcatatttacaaaagtagaacgtatttatcatccatcacaatataatttaataaaagctcatagtaaacatacttattgtgttctggaagttgtataccttatctctttatttgtcctacatctggcagagcaggcataagtggctgaaaacaatgcaaattcattacctggcaattctgcttggtagaaggctgacatgggtcagaatgccataaaatcagtgtgttaaccgtgctcctttctcgaggctctaggggagaatctatatccttgccttctaaatgctgctcactttccttggctcatgactccctttgtttgtcttcaaggtgggcagtgtagtatttctctggccatcatcacgtttctctctggccgcagccaggcgtggctctccatttttccagacttatgtaattagatggggctctacctggataatgaaggataatctttccattttaaggttcttaacctccatcctgtctgcaaagtccctttttcatagaaggtaacattcactggttccaggagtttggacatggataactttggggagaccattattctgtctacccacaaccaccatcctcttttccaaatgaggagagtaaggtctggaggtgttagagaggccactggatttaccaacagctacccaaaaaataaggtcagagctggctttgaatgtagctttttctgattctccattgctgttagccactttgctacatgcagttgtgggctttcaggtcttaattttacctattaaagggacttccctagatccaagggttttataagcatttctgtgtgatgtttctataagaggttttctgttggggggttctgatgtttcatagttaaagtgacttgtcctgaggtaggggaaagtgggtgacaatgtttagagtttatttctacttgggctattgtaggtgttatccaaattctgcctgtcttttctcatggagacttgatagatgaatggaacagaagagagattaataattattgcaaggaaaaaaatgaacattcaaaatgatctactttgtggacagcagtgaagattccatctgttaaattagaatttgagtaacatttcacaaatttaaaagacttttcctttactttttgaagggcatgatggagatttttaatacgcagttttttgtgaaggttccccccacctttttttttttttttttttgctgtgttactatatgcattcttatagagtagattttctaaaattatatatctttcccagtttaacacaaaattatttcatattgggacctggcacttaaattttggtttaaaagaaagctgtgcaattgtatgttattggcatattgcaaatcaccaactgtggttctataatgttttctaaaaatgctggagataattattgaaactaatatatatgtataagctcttccatcatgtggcatttaaagacttattctttgtaattttcaatctccattttcagtttgcagaaaggactcgattcttgagagaacacatcattgtgaaaagttaataacaaaacatgaatttcatttgcttccaattaagcaccaaaatgtcaaaacttaatatcttcaaaatgcatattaagccacacaccttatgaaaagtatgatgatattaaaatcaagtatagcaatccaaaatcttcatgcagagcttgaaatgagtattttagttttttgaggctacaaaggtaccttgacttttagttttattgctcaaactgaaactaaaattgcatgttactagaaagatgggctgggttgtcaaactagggaccatgggccaaatttggcctgtttattttataaataaagttttattcaaatgtagtcacagtcatttgtttttgtattgtctatgggtgctctttcatactataattagtgagtagagtagttatgaaagagacggtatgggccacagctccaaaaatatttactgtcttattcttttcgagaaagtttgcccattgacccctaatctagtggaatgtctgtgtctctaatacaggcagacacttgcaagtcactgtcagataaactgattttactatatatggatgttttggtgtatacgtatgcatacctttcccttttttttgtaactattaaggacttcttttctgatttatgttgttcattataaggttgagtggcccaattattcatcctactgtgatttcttcataccaattaccgtggtatggtatgaaccctggtactggttcttccagattgtttaatcagctgattctatctatacgtcagcaggtttctgagcttcctgtctctttgtgactgtacaatggttttctttgttgtgtcgatgataaatggattgatgatatataaatgttcatggaaatagcatttgttccaaacgacaaagccatttataaaatgaggactgtaattatgagtcctactcatattctgtacattcgcgtttctgtttttgacctgagacaagtgttggccttgaaaaagcttggattggaggcaggagaggggtttattttggttccagtcatggttcttttcttggaaggctaagctgagttgctaggtgtgggattgaagggtgaagctccaaggtggcagccagtgtggatccttagaagttttttactctttgggatttattttctatttttatgttatgttatgttatgttatgttatgttatgttatgttatgttatgttatgttatgttatttattttgagatggagtctcgctctgtttcccaggctggagtgcagtggcaggatcttggctcactgcaccctccgccttctgggttcaagcagttctcctgcctcagtctcccgagtagctgggattacagaagcgtgccaccacacctggctaattttttatgtttttggtagagatgggtttcatcatgttggccaggctggtcttgaactcctgaactcaaatgatccgcccgcctaggcctcccaaagtgctgggattacaggcgtgagccaccgcgcctggcctacgctttgggatttataagaagtatattagcattttaagaactgtattagttataagaagacatagagtacttttttatttttatagctttttaaaaatattataacatttaaaatttttaatttgaaataattttatacttcagaaaacttggaataatagttacagagtatttccatatacacttcatctatccctaatgttaacattttacataatcatagaacaattatcaaaagaaagaaactcacactgagtcagtactgtcaactaatcagatctcattagaattctgcctattttttcactaatgccctttttctatcctcccactccatgtagttctcattcttcctcagactcctccaatttgcacaatttcctcgttctccttgttctttcttttactttcatgacccttgatacttttggagagccttatttatgtttcagaatatccctcaatttgggtttgtctgatgtttcctcacgattagatggacgttatacatttttggcaagaataccacaaaagtaatgttatatacttcccagtgcattttatcagatggtacttgatattgctgcatcttactatgaatgacgttaacctgggtacagcagtggctgccaagtttctccacttcaacaatattactgttttgctttttagtcaaaatgactcttctggggagacattttgagctatgcaaatatcctgttattatcatattcacacccattaatgttagtatccattagtagattttacctgaacgatttttatggtggaggttgcctaatgatgatttctgttgccatcattccttctatttattatttggaatgctacagcagggaacagctgtttattctctaccatttatttgttcaattatttatatcattatggactcatggattttagtttattctttggataatgatccaatgccagtatgatttctttagtttgtaagttgtctccgctttgtccattgggagccccttcaggttgacacctgcttccatttgatgtgccttcatcatttttgagtacccctttttgacatcacaaggcattccaggcttaccatgtgtttccctgaccacagccctgaaatcaaccatttttcaaggagcccttgttcattaactggagaatggtattagaaaccacgatctgggtactaggcatgctcagtggcactggggatgccattgtttctaggatctctgtgtggacagagctgggaactctttatactcacacattcattaacatttattgatatacttacccatttgtcggtgtatttacttaactatgtacttataaaaactgtgagtttggccgggagcagtggctcacgcctgtaatcccagcactttgggaggctgaggcgggcagaacagttgaggtcagaagtttgagactggcctggccaatatgatgaaaccctgtctctaccaaaaatacaaaaattatctgggtgtggtggcatacgcctgtaatccccgctacttgggaggctgaggcaggagaatcacttgaacccaggaagtggaggttgcagtgagccgaaatcgtgccattgcattccagcctgggcgtctcagtgagtctccatctcaaaacaaaacaaaacaaacaaacaaacaaaaactgagctcatactgatgtcctggattccattctgagcaccagtttattctagctttttcttctctgtaacttctgtttctgactgtgaaaacatctgcttttattatcaaacatatttgcactcttttgttcattcttggtgtgtgtgtgtttgtgtgtgtgtggggggcgtgtagtagagtaagaattgctaaagagaaacaaatttactaactggaatatttgtatgacaggtttgtctttagcatgtatcttatgcacaaatgagaagatacatgtttagtttttaatatcccctttttatgtgaatagtagttcataccatgtgtgtatacacacacacagatatatatgtatactcatatatatacacacttttgcatttttcttttccatttaaatatcctatatttttaagaagatttatatctgtccctgacttagcatgctgtgatagcaaacaattttattattttttcacccatagacttttgaatgtgaaatgtacgacttagaattatacaagtaaagcatcaaaatttagggaaacactgtttctttgaggtttttcttcgtaaaacttaccattctagggtcatttatatcagtatttttgcactgtagaattatgtcaaaatagtacaaaattttggtagttaattaagtgcctttatttataagtgcacatttacctttcatttctagctggtagcagtgtttgatgagcaggatccacatcacggaggtgatggcaccagtgccagttccacgggtacccagagcccagagatatttggtagtgagcttggcaccaacaatgtctcagcctttcagccttaccaagcaacaagtgaaattgaggtcacaccttcagtccttcgagcaagtaagtgaaagctctttcttctcttccatttcatcttaatttacaggaataccaacttttgttattcatccatgaccctgtaaatggaattaattatctgttttattcaaaaattaagtttaggacccaggcaaatgttctttgcaagagaagtaggcagttctttacattgtaatagattaggctttctttactttcgactagtagactttccgtgactcgctaactgtaaataaggacaatagttcaagttaaattatttggattttcctttccatatgtttatctgaatgctagaacaagtagaaatgaccaaagagctttgcactgaaacaaaacgtagcatcattcattacagtcaactctgttacaaccgtcatttatattatttgaactttatctgaagagctggggaagaagagaccgccgtgtcaaagttatcttcagggatttgggagagcagtgattagaatacctccttagggaaggggaatatggacatagtgagtcctatatgaggaatcctaggaccctgggtattccagatctgggatacttgcctgaagagttctgttagccattcttggaaggtactcataaaagtcaggtatttttgctacaaatatttagtgtttatagttgtataatcttgtaattgagcagttgttaagagaagatcaatttcaataaatgtgtaaggttaaaagattttttggctgggcggggtggcttatgcctataatcccagcactttgggaggctgaggtgggcggatcacctgaggtcaggagtttgagatcagcctggccgacatggtgaaaccccatctctactaaaaatacaaaaattagccaggcgtggtggcggttgcctgtaatcccagctacttgggaggctgaaacaggagaattgcttgaacgattggaggttggagatggaggttgcagtgaaccgagattgtgccactgcactccagcctgggcaacagagtgagagaaaaaaaaaaggattatttattttttaggtacatctatttggaaacacttcagtttttttcaggtagaaaatttgggtcttacgtgtctttactgattggtagtcttcagtagatatttataaacagatgggtaataatatgtgttaataaaatatatatataattaagatacagaatataggtagataatatttagaatatataatttattcttctaaaaatgcatcctaattccctttttttgcattgatagcaatctgtagtaatttggcaatttgcttctagatgtttacaaactacttctgcttctcttgtcccttgaaggtgtatataaagagaacaaggaaagaagagcagtttaacagttagagatctgttagcccatcagaacccacaggacaatgcgccatacagagtgtagagaatttagaaggtgtagttcaagatgggatacgtaagtgatgctctagaggattgcgtgcagctacagaccagtgctaaccacttcctacaattgctttctatcatccagacaagatcggactcagatacaatgacagatgtttccaaggatacttggggtggaacagaacctataagttgttttagttgaatattttttatatgcaagagatttagctttatttatgcacatatgcaagaaactaattttgtgaaaataattttgttgactactaggatatactgtttaaaaattcttacattagatttgctttgggcagtgtttttcaaaaggtgaggcatgtaccatacagcgtatacaaaatgatgtgcaggtggtacactagttaccctggttgattttttattagttcattaagcctacgacttagtggatatctgcttggaatgatcctgtgtatacaatgtagactgcctaaatttgactcatggaaaatttaaatagtagttcaggtattcagataccagaagtttggaaaatagtgtctttatttgagtaataacactgtaatgtgtatacttaaatacagaactttctgttgtgttaccgttgtagtgttgtacttgtatcttttctaaagcaatttgtagctttaatatagccacaccataaaaaatattagaagaaaggttaatttctttatgttgatttatgaatttgattaacatactttccgtcaatttttaccttttgactcctctggactcaacaaaatttctaacacataaccatccacatttgactggccttatgtgttaaaatttaaatggtgttttaaaccccaaatatctctttttatcttgtttttattgagaaaaagaagttacatttgaagcatatgtgttgtcttgcagccaccagtgggagaatatgcaaatcttattttcttgttctcattttggtatgctaaggtttagattttcagatcttggcaggcattgggttaagcatctactatacacaggtccataactatgtgaacgtaatgcatcacacatgagtcacctgtcaaggtgatttttgccaccgcattaatgacgttcattcagacatagaagatgaatttgtccatactggccatgccttgtgctaggtggtgagtcctgggttgagttaataaggcctggcgcttgctatcaaggagctatagttagtagtaaatggtagtctaactatttacagatatgaaaagaaagaagccaacaatatgtagagatttgcttaattgaagataaataaatttctaatttttgccttaaagaaggagtggtcactttcctgtgttttccaatgaatgaattcactcatcccctttattccataaagaattggtggaagttgagaaaaatatatagagtatgtatttttttccatagaaaaatggatacgaagtttgggtattaagataaagcctagatggttttcatagatggaattctcatcttgaggtctttttatgtttccctagaagctgccattaatttagccctgagcttttttttgtagaaaatacagagagaactctgatttagttaatcattgctcctcaacctcagaagtgttttctccccaaggaacatttatcagtgtctgatgatatttttggttgtgacaactggtggagttgggcattgagtagaggtcaaggacactggtacataccttacaagcacaggacaatccgacatcagagaactctgcagcccagatgtcagtagtgccacggttagaaaccctgaattaaatacatcattgtttgtatagtcaaaatagcagttaacttaaaacttgagaaacattttgttgattccagtatattgaacagtatcctgaataacactcttaaactagaagacaaacatgtgattactagttaataaaaatgtaagaaatgagaaagttaagtaagataatccaggctgggtgcggtggctcacacctgtaatcccagcactttggaaggccaaggtgggcgaatcatgatgtcaggagttcgagaccagcctggccaacatggtgaaaccctgtctctaccaaaaatacaaaaaaattacctgggcgtggtggcacacgcctgtagtcccagctactcggaaggctgaggcatggagaatctcttgaacccgggaggtggaggttgcagtgagccgagatcatgcccttgcactccagcctgggcggcagaatgagactctggctccaaacaaaccaactaaccaacctatggagaagggagagaataggatggaggaagtaaaatagaaactagatgcatactatttccttctgtatatttgaggttggaactatattatcttttacacaattataaaatgatcaatttttaatttttacagtaaacatttcaaatgaatattaatattcatacacttaataaattttaattttaaagacaaaaaatgagtatgaaatatctgaccataaatatatttttttggtagcctaaacataacaagagtaactatttcaattaactttaaatcaaaggaatttgtacaaagggagatgtatcctaaggaaaaaaagaactgcctaatgacaaggacccggaaactgtttgtcgttggtattgttaatcttagatttttgggtgggtattacaggatgaaagagatgggaaattataatattctaattttgtcattcctggtgtcattgagtacccagtattcttagtatagaagaaaaagtgtacagatataagttaaaggagaatgaacaaaaaatggatagtcctcagtttagacatgtcatagttaattcctgatatgttttagtttttaaaaaaggaacgtggagggaagaaaaactcctgtgtatattcacagaaaaggtctagaatcaatgaccaacccagtaactcagcatttctcaatccagactatgctctggaaatagcatttttcatttgaggggatcagagcttcttagagaaatgcctgaatgcaagcctgtacaggaaatgtatgggatcatcctggatcatcctgtcatatcagaaaatagggcagttatgaaagattactagggtgggccagagggcctaggagacaacacgatgctcctgctggccaaagacgggacagtgggagcatcaatacagatagcaacagcaatacatgcatgagtgtataatgataataaagaagccagcaagcaaggagaaggctaccagtgagccatcttattatttggaaaccttataaaggaaagcaggaataagtcatctattctgcgtttccttgtagtgtggtttcacgggatatccaaatacttgctttttatgtaagtatttcagctaataaatgaagacataatggtagcattggaatattactattctgcaacttctgatgacataatggatctaggtactgatcattgctaggctcttaatgtgtccccccaaatttacatgttggaaatgtaatccctagtacaacagtgttgggaggtgtggcctaatgggaggtgttcaggtcataaagttgcttattatttggaaaactgttcaaagaaagataaaattaacagcccgggctggtaatttataaaggaccttgtctctattaaaaatcaaaatattaggtgggcatggtggtgtgtgactgcactcgctgtggctcgggaggctgaggcaggaggatttcttgagcctgggagatcaaggttacagtgaactgtgattgtccactgcacaccagactgagtgacagagggagagtctgtcacaaagaaaaaaagaaatctattctgtgtatcctttgtatgagtggtatcactgtataaccaaatagtagatgaagaggaaatcactttgtatatatgtattaaaaattacttcttagtataaaaagaagagtttagcataaaaatagcttagtataaaaagagcttgaagtactggggttactctgtcgctttgtcatgtgaggatgctgcattcattctctttcccttccaccttcctacatgtgaggatgcagtaagaaggtcctctccagatgccagccccttgatcttggacctcttgggctccgggactgtgagagagtacatttctgttctttataaattaccagtgtcaggtactctgttagagcaggacaaaatgaactaagacagtcaccattaaaaaataataatcaaggagagacaaccaaacattgtatgcctcctgatgaaaaaaacacaacatctcctataaggtagtcttgacaaaagaaattaatcatgaatctgatcagacttctaaatccaagtgcctatttacaggaaatacagaaccctgagaagcatgtgaacacgataggggtgcaatcagcctagtcaagatggtgggaaactgtgtaagacaaatggcccacgttcttcaataaaatcaactgcaggggcagaaagagatggagagggaatttataagttattagaaacttttaagagatgtaacatccaatcataatgtctggatcttatttaaatcctgatttaaatgaggcttaatacaaagaatgacatttgtatgctgatgaataaaacacaaattgggcatttaatagtaaggaattatttagatgcaataaggttattgaaattatttttaaaagaacctttaccttttagtagtatgtaatgagttatttatgattaatacaatatctctagaattttcttcagaatagtacaggctaggggatgggttacctaaagattcagtatactattctgtctacttctatatgttggttcaaaattatccttaataaaggtactttaaaaaaaaataaaggaaacacacactcaaggcacttcttagtagtttgaaggtttatttaattacttttctctttgaacttttttcccccactccatatagcaccgaattttaacctaatcttttttaggcttgaatatttttattggtcatcttatttctttgcaacaaacaaagtacattaaaattttaaatatagtactgtgtgattattaatatataatagatcaaaatagcacaaatatacaaatatgtaacgttttgctttttaatgtggaaataagtgaagaccatccaaatgagaacaggtgaaggctatttattcagagcttgctgtagttagggggcagctatcatggcttgcctttgacggaggctcccaggcaggctgaggagtgggaatgcttttgcatggagaaatgggaaggcttgagtgtgctctgattggaaactgctggcatgaggtagctgcaggtgggctacctagaagaggggcatatatggtgtgattgcttagaatttcatatttggctttctctggttgttcctacgttggaaggagagtcagaacttagggagtaaatggagttttgttacatcagtattactcaattcttctaattccctccaagttaaatgctaaacaccaattagtgatcctttgtcagaaattatttttatagatatatcaatgagctgaaaactggcttatgatatccttcttttttgttgaaaggagggatctagaaactagttgagtggcaaaagtgtttgttatccagagggatttatgttctcagccttgtggctgctgtattaaactgtgctttgtcatcctggaagtttttatgcacagttgtacatcaattgtaagattcaggacaggtgatgctttttttttgttgttttgtcattttttcgatgcgtgtgtttgttgtttgttttttaattttgcaaagcagaagagctattcaggacactatcatgactttcctggactctgggcgctttggccatcatgggccgccctcaccatagtaatatcagtcataaaattatattttatttaactttaaatatttcagtattgtactttttccattttatgcatcattgaattgattttcatggttcctaagagtatcattttcttctgatatgagaaaaaagtgaaaacattttctttgactctaaaaatttgtttttctgttttgattttaaaggaaaataaaacactatcctgggcttctaaacttattgtggccctggacactgcctcatggacatactggctttggggctgttgaccatggagaattggatgggaagaaaccacattacaccttgacccccttgttttcaggctcgtagaacctttttagggaatgatgcatattgaacacgaagagcttgacatgggataccttaaaatgtatctctcggaaggtctttgcatgctcccaggtagatgcatgttctgctctgaaggaaactggttactagatattctacataactgttggggtttttttccccacccagattttgataagtttgagtgtatattatactttatgggagtatattctacttatgctttcaacatgagcttgttatgcagatactcctttgtaatatagagtgtttacatttcagaaagagtacaggaaagagagtcacaccatcttggacactgggcaaggttagtaggtaattacactggtcgcctctttgagtacctgcctcaggatggttttgtatagtaatgagataatgttcacagttctaatgcagcctgtgacacaggagaagcactagactaacagatagttgtggaatggtgtgcgcgatcatgtctcctgagtgcagatccacttcctggggatgtgtaaagaggttgagacgttactcagcccaagtaactaggacatgtattctggaatgggacactactggccccttaggtagatggagtggaacttttacagagtcaaattggaaccatgtctgtgatatacatttaactgtctttattttcaatattaacaaatcaggcttagatctgaagctttcagggtcacacagttcaggtgcaaatcattgagtccaaggctggtgatattttgtgtatgactttttcactctatgattttttttttccttcagttcccaaggactttttgtagaagtcagatatttgagggtagcccaggtttaggtcatggctagattccttttacctcacaattcaaatttttaaatatctcctctggaagatctagactgaagaatgaagtttcctttgaaaatgatgtaagcccgaggaatggtgaaatttctggaaatggtgttgctataaaaatttggggaaacaaagtatctgatttatttcatttctttttttgctgccttttaaatcttttgttatttttaactttttattagctatgttaattttagttaatttttatccattacttgggaaatttgtctgaaatgatggtatttaattaactgataagattttactatcttcctaacatttagaccttaaagaaatatcaataattgttatagaaagcttgtacctaagttagtgccccctcccacttcttgatttcttaattttttttcttagcaagcatatacagattgattttgtctttctagaatatccaacacctttggtatagagatctgtccttctaacatttgctggtatcagagtactattttctggatctgatgtaagtacatattgcaaatagaaataatattcctattgtatttccttttaacttgtgaagtggagcatggcatacaaatggtattctcagtatttcaaataattaccttcttactgtgcaagttctattcagcatataaaacccatccagttttgttgtagatgcaatctgattattacatgttgacaaggtcatatatctattaattggattggagatgggatacaaaattgctgtaattattgtaattttctagctaattgcagggttggtggtgaatattttacttctgcaaaatgaaaaacagtattccatcagaagttgttttatggggtttcagacattttgttttatatctttggtgctttttgcccacaaagtatctccttttttgtttttttttttttgtttttttaattgatctgaatgtcacagtgctcattggcagggatcggcaaaatcaggcacaggcagagagctgagtagtactctcagctacctctttgttcccgttgccacgttacctctattgtttatttataaattggagtactcttttttctgacctgtaacaaaggttggaggggtcagagccaattggaagaggatcctctgccctcttgtcccctgcaccccactcagaaatactctcttaagatgagcatttaagaaattaagtttatatggtttatgtgttcttttttgcattaaaaaattaagtaaattattggtcatcttagtatttgtaatacagggcttactttgcatattctcccgtagttttggttagaaaactgggagctgtattggcatttaaaaataatggtgtatatgcaagatgtgtttggagggttgcagatcagggacactgtgctactgtggggtgttggaagctcactgcagaagatggtaaaagcagactgatgtgtattccctgctgaaagataaactggaggcgcaggtgaaaattgccaaacctaatgagcaatttggcggataagacaggctgtcaggcggcggcagtgcagcagcaggagcactgtgaatcaacttgtgtgttccagagaactatatttaaataacaccaataaaatcttctttttcactgatatttgcaatcacaatgaaatttactttatccttcagatttccaattaaatggccattaacatggtgatttttgttgtaaaattattttttaatttgcctgttgacatttttcatccataaaacacgaacaagatatattttccatacctagagacataagtaatattaggttttctaacacattaataacatgtaagtgatcacctcggtggactgaaacatttcatctgtggacttgacagtggagcagacttagataacattatactctcttcagtgtatcatgtcatttatatctgcttgcgttgcccgggaattctttgctcccattgggctcatgaaaattgagacatgtgcatgacttctccccattgaggccatcaatatattgtataggagagacttagaaaagattttcataaatgtgttgggtgcaacagctccttaggaaacttcccagttcaccttcctgatgtttaccatttggaaattgaggcttgatgtaaaataataacatattctgtactcatggcataactgaagcccaggtctccaaattcaggacaagcagaggtattgctgaaaatgtatgagtacttattacccctcaagatctgtggcatttccaaactcctgactttggtggggcccaagcatctttgcagttcctatctgttatgtcatcagtatttcttttttcttttctcttttttttcctttttgatggagtctccctctgttgcccaggctggagtgcagtggtgccatctcggctcaccgcgacttccacctcctgggttcaagtgattctcctgcctcagcctctccagtagctgggattacaggcacctgccacaattcccggctgatttttgtatttttagtagcaatgggctttcatgatgttggctaggctggcctcgaactcctgacctcaagcctgcctcagcttcccaaagtgctgggattataagcgtgagctaccacatgcagcctggcatcagtatttctaagttgtctttaagcagaataaacatttggcccatatatttaattgcatctctgtgatgcctgaaattaaaaatcattacacatatgtaatataatattttacactttataatagtaactggtgcagtccattggccagggaagtattattttttagagatatcctgccccatgtcatcagatgtagacattggcctggcattcatctggaaaggcttgcctgttgggggtccacagggctgcctgtagggtgtccacagagccttgacatgtggcccgttaggatggcgtgagtcacagatttcaccagaatttgcctttgaaattagacccaaaccatgtgctactggaccccctgtgcacaaagctctctgtatcattcaaaacctgatgaaatcttagggaagaacaggtttacacattcattttttcccacacaaaagatttccccactgcccaattcttccctcttcacttccttttacccttgactattatatttgacttgactctgaggtcttgcctggtactgttacctttgcatgagaataagccttatttgcctaattatgttacctgtttatcggaagcagaaatagttacttacacttgaaaatttgtaatgggaatgtagctgtgaatatgttaagaaagcctgtttaaatcaaagcaagaaatcccatttccaaatggtagtaagacgtgtgttacatggagaaaataattgcctgaaagtgtttgttgtatttgccaagattagattgtacactggtcaataaacaagagttctttttttttgtttttatctttcaatccaaccaggtacttgggttcgtttttctgttggtgcatgtcacacagagacccatattgtggattattttgtcagcatgaaagcctggcagatacaattctttcccctcttctcgctgcacttgatatagatctctcctttacttcttgataatacgtttgcttatttatttgttcgttgcttttagtgtcagcagtggctttgtgtcctcagttctgtttgctcctgcctggctcctctacccagctggagaggtgcctcatatctcagaatttctgagtcactcccaatcagtgactcctttctttttcagtgactaagagaaagctgcccacaagccagcaaggtgctgataagtgtgcctctgagattctcacctctaacttttccatggaatggacagctggtagtctctctctgggctacattttaaaggaaaaaaagaagtctaaatcagtttattaattcatggtgttattttgtgtttactcaatttatttatattgattggtaaattagtaatttacaaactattatttgtcaatttattgcctacatatcaacaaatacttttcttttttttttttttttaatcttggggacaagcacattggctcagcctgtaatctcagcactgtgggaggcagacgtgggaggaccacttgaggccaggagttcaagaccagcatgggcaccatagtaagatccagtctctacaaaaagagtaaaaaatacaaatagctgtacctggtggctcacagctactcaggaggccaaggcaagtggctcgtttgaaccaaggagttcgggctgcagtgagctgtgatcataccactgcattgtagcctaggtggcagagtgagaccccatctcttaaaaaaaaaaatctgggggctccagtgtgtatactgcatggcttgtgaatgtggaagtgcagtgagcatggttttgctcaagaatgggttgatgatagcactttcccagagtaaagctcgtttttataaaatcttcatgtctcagaactgatccctgctttaactacttttctcactggcatttgaaagcagttaaccagatatgaaatgaatgattttcataactctataaaaggagcattatgacatcatctactatttctcctttcttgttctcataaatccaaaccatcaacctgtttattcttgtgtactggcacactgtgtattcccagcatagaatgcctttctacctatgttctctctaaaacttgtggaaagttttctgcaccttaaattttctaccctagggattaaacagccgctataagtcactttcccactcctcctcacagaggaaaggatgaatatgtaatagccatcacagcagcctgttgtctatcctgcggtgtgtttctaccatatcacacaaagcctctttttcttgtctttttagtagtactttggtagtaatttttttaaaaagtatgtaatgtctgtatatacaaatacatatatacgtaggcacacacagagctgatatttagtgaggttatatatggaaggattataggaatagcatgtaatttaagaataaattatcttttaaagatagatcccatgtttaagatgagaaaatacagttagatcagttagggatgcctctgcccaaccataatatggaaaaagtgtaagcaaagggcattttagtgaactgctagggtactcaacctatcatcacatttaattaaaatgtcattttgagccatggccgactcattcgttaatttgttatttaaaacagcttgagaagtatttattttaaatacagaatttgtgttaatgaattggaaaagaatattgtattgcttggcagagatgttatagcctaatgatttgtggcttagaacaaggaaaaccagctggtgatcagtttgtctaagtagtacatgagtatctactaatatttgataatagccaattttttttaataaccagaataagggagttgggaatgggaggcagaaacaaggacactgaggcataaaactgcatttaattctgagtatgggtctgtgatccatggttcagttggatcccttatgaggagagggaggaaagccagctgggcagagatatgcatgggcctgtgtctgtgcttctgccagaaaagaagtcaccagctctgccttcctcacttctcccccttgtctaagatctgtccttctcttttcttcaaaagtgggaaattagtttaatcaaagttgttgttttttgtttttgttttttttgagatgggatcctgctatgttgcccatactcaagtaatcctctctctgagcctccccagtagctgggactataggtagtcaccaccacacctagccaagtctaatgtatagtttattttttccaattttggaaagcagggtatatgtagttctgagtgtctgtgtgtgtgtgtctatatatcgctacacacacaattagtactagtctattcttgctataacaaatcatcatcatgttagggcttaagagtttattacagtcctgcatgtcagagtctggtgtggatctcactgggctgaaatccagggttggcagtgctgccttcctgcgggaggctctaggtgagaatctgttttcttgccttctccagattctggagtccacttgccttccttcgtgtatggcccttcctccatctctagcattatcaaccttgtaccttgtggacccttcttctatggttacatctctctctgactcttccgttctgaccttctcttccacgtttaagactcatgtgactacatagtcttgaattgagtgagactcaggatcatccaaatgagcccactgtctaagtccattcaggctgcttcaacagaataccttagactgggtggctgataaacaaccaaacctcatttctcatgtcctacaggctgcgagtgcaagatcaaggtgccagcagttttggtgtctagtgaaggcttgccttctcatagatctttacttctcaatatgtctttacatggtgggaggagcaaacaagctctattgggtcattttaataagggcactaatccaagtcatgaggacacagcttcccacaaggccccacatcctataccatcaccttggggattaggatttccactcttgagttttggtagacacaacattcattccataccactagggtaatgtcctgatgccaaggtctttaccttaatcacatgtatgatgtaaggtaacatggcaggttctagggattaagatgtagacatctttttttttttggcggggaggagggtgggagggcattattttgcctaccacattttacatgcatttaaatatttacggtagtgtgaaaataacgcactttacaaatacatcgtcttccatgataatatgaaatgagcatctgacctagtgatattaatgggctgatcattttgatttcagtattttgggaaggaaagtaatgaacagtaatgatctagtgagtgtattcacccattcttacattgctataaagaaatacctgggactggggtaactttcattggctcactgttctgcaggctttctaggaagcatgccattggcatctgcttggcatctagggaagcctctggaagcttataatcatggtgaaagttgaagggggaggaggcacgtcacatgacgaaagcaggagcaagtcgggcagaggggggtgccacacacacacttttaaatgatcagatatcctgagaactcattgtcatgaagacagcaccaaaccatgaaggaatcgtccccaggattcagacacctcccaccaggccccacctccagcattggggattacagttcaacatgaaatttgggcagggggcaagtatccaagccatatcagtgagtatttctttgagaccattttttatttaggtgagccatatggggcaatatttgtacaaataaaactctagccattatataattgtggttgcttgataaaaaacaaaaatctgtggtaacaaattagttatttttaactcttttgcacaattaaaagtaatatagtaattttttagtgctgtagatgggaaattttgatgagaaaaattatgtacaggttgtgaatattgtgcatgttaggaagtttcattctttcactggtactctctcttgttcaagctctcctctttccttctgtatgacttattttacttttaggcattaaattattgttacacaagttacgttactgtattcattttatgttattataatttatgttattttatgtaacttttgttattggaacataacagactggagtgcagtggtgtgatcttggctcactgcagcctccatgccctgggttcaagctgttctcccacctcagcctcctgagtaagctaggattacaggcatgagccaccacacccagctaatttttgtatttttgtagagatgaggtttcaccatgttggccaggctggtctcaaactcctgaccccaggtgatctgcctgccttgacctcccaaagtgctgggattacaggtgtgagccaccgtgcctggcctattttagacaattttaataattctgttttggacagaaactttaaaaatggtggaagattggttctaatgagtcttcatgagcacattgacctaaaggccatttttgttttacaacttactttcttctttcgattttgaaaaagtgcattcttgggcatttactaatcttttagataattaaaattttcttaagcatagcacccttttctagttttatgtgtgtcctacattctgctttattttgtagcttcttccagacctctgtagcacataaggttttataaagtcagaatcacatcttcatcatccctgtgtgtgtgtagcacgggtttgatgctttgcattcagcaagtatgtagtcagccctctgtgcctgtgtgttctacatccatggcttcagccaacatggattgaaaatgtttgaaaaaaattgcatctgtactgaacatgtacagactttttttcttgtggatgttccctaaatgatacagtataacaactatttacatagcagttacattgtattaggtattataaataacgtagagatgatttaatgtgtcctggatggtgtgtgtaggttatatgcaaatactatgctatgtcatatccaggactggagcattctcaggcatctgggaccaatctcccacagacactgagagatggctggactctcctttcttctcagccctgtcaaactagcagtgacatcaaaaggaagggccgcatggtcttgggcagagttggcttagagaaatagagtatgcttaattcatttcaggttctagataatgcagcatgataaaagactattcatatgttataaatataaaatttcaacagatccatgtttaaatgtgtacttcatatcttagcagattcctttaatgggatttttttttttttacactgaggaaatatttcacactattttccgctggatgcaatttaaaaaatctgtttcaatttgtatacattctccaaggttgtaattttatatggaaacctcgcaaataactttttgtgtctatatcctcacctggtatatgcttgctgagtgtccagagcaatagtctatcatcgtagaaaatggagatacccttgattagaaaacatagctactgaaagcacatctgaaacaataactatttggtttttaatttatcatccatcttcacatactctttttattgtcaaagtattctagactgctgcattttgttaaaatctaagaacaaagctttattgcttaagaggatgatttggctataattttgtagttatattattccttatcaacttaaaaaaaaaagaacatgtacttagagaaaaaaatcttgagctaaacaaattgagtaaccattgggggcatacttttattctcaggaacttggctgctgtatgtcttcctctggactcatctacagtaaatgatgtttcaccatctattggtaatgaaaatggtgatatgtgtgttatactttcttatgcaagagtcagggctattacttcagtgctattctaagtgtctaaaaaaggtaggagtgtgtgtatgtgttgcagtgattcattacctttatttttctatgttcacacgtaagtgattatccttatttattggctggaaattgagtattaatgtaggctttttaatttttgtttattttttatttctttttgaggcagagtcttgctcttttgctcaggctggagtgcagtggtgcaatcttagcttactgtaacctccgcctcctgggttcaagagattattgtgtctcagcttctcaggtagctgggattacaggtgtgcaccaccacacttggctaatttttgtatttttagtagagacagggttttgccgtgttggccaggctggtgtcgaactcctggcctcatgcaatcctcctgccttggcctcccaaagtgctgaaattacaggtgtgagcaacactgtgcccaggggatagtggcctttttacttcaagtattcatagcaggaataaagcgtgacataaatggcatgtatgaaatgagaatgatgtgtataaaactcatgggacagtgactaatatgtcttaaataaatgaaatgttatattccgtggattattttctagatttattttcctaaacactgtctttgaaatgaatacctacataccacacttatgcatctccctcagacttttaaaagaattattaatcaaatgaagctgagaaatactgaagtgtctctttctacatctgactgcttcttataatttgctgtcagttcctatgggtttcaagcttaattctatgctactcgtatttgaaatttttgttttttttctgcctacttacctacaatcttattggtaaatataatctttttgaacatcttatagtaatatatcttatggaaatcaaaataatataagaagttctttgaggaggtaggagaggggggaaagcacttctttacatttctttgtcacggtttttgtatattacttcggtgccccttgaattattttccaagatctaagtatgtgtgggtaaaatgcaactgttttacatgtgtaactttattataattaattgtgtttcatcttttttaaagatggaaaaaatcacactgcaatagtatttgttacttcttttcatagtcaaagcacatctaagtaaattgagttgaggccacatcttgacccgctgatcatcttgttaaatttcatgttgcttcctagctcatttaacttgtgaggaacagcattttaggaggcttgatttagcaattcttttcagtaaaaccatacctcttctcaatgaatgttgtataaagtcagcacaacctgttccaaagagatttattacactgtagtgcagaaaatattgtagaaattattatggtgaacgtgtgacttcaggcagcttttctttaaaaaaatataaccttaattgtggggaaaagctctcactgtcatccttcagtatcgcttgggggttggttccaggaactcctgcagataccaaaatctgaagatgctcagtttcttatttaaaattgtgtaatagtttgcatataacctgcacacatcctcttgtacactttaaataatctctagattacttataaggcctaacacaatgtaaacgctatataaatagttgttatactatattgtttttatttgcattatttttaatttttgcattatttgttatttttattttctttttcaagtattttcaatctgttgagattcagtccgtggattcagtttgaatccatgaatgtggaaccaacagataggaagaccagtggtatttagtgttactacattggatatttttcactagtcttctgcattgctggatcacattatttcattttttattacagaaaattttaaacatacagctcaactatcagctctaacaattattaatttatggctagtcttgctgcatctatactcctacgaactcatccaaacaggattattttgaaacatatttcagacctcatgtcacttcttctgaaaacattttagtatacattttaaaaatagtatactatttttaaacgttaaaaatagtactgtttaataacaaaaatacttaagctatatgtaatagtgttattaaaatatctgaatgttttgtaaatgttgctttatatttggctggtttagaatccacacgaaatccacaccttacatttgattgatatatctcttcggattcttttagtctataggttgttcctcctgcctgacccctgtgcatgtgtttcagtttcttcgttgaaattgggcttgctttctcctgcagcttcctcctgtcttgacttcgctgaatccatccctgtggtatctaccatgttctataacctcggtgtttcttataaactgataggtggatgtagagtcttaatataactccgatttcaatttgtaataatattatctccaggcattgttgtatggttccatcagcagatggggacagtgtggttgttcatcattttgtgagcagcccctggtaattattacctggatcttttatctgtctacctgttattactgtaattcctttatttagtaggggaatatttctataaacagaaacttttccttctcagctattcttgccagttactctgaggtatacagttcatatggaaagtgtaggccaaatgcttaatttcatctgtttctttatcagttttgtttttgtttcttttttttttttcttcttcttcccttttgagacatggttttactctgtcacctaggctggacacccagtgcagtgatgcaatcttggctcgctgccaagacctcctgggctcaagcatcctcccatcttaacctcccaagtagctgggactacaggcgcacaccaccatgcccagctaatatttgtatttttgcagagacagggttttgccatattgcccaggctggtctcaaactcctgagctcaagtgatccacccaccttagcttcccaaagtgctggtattacaggcatgagccaccatggctagcctcttcctttattggtttcagaaaaaataagttggttttctggggccacatcctcacggttcatgtttactgttttttttttttttctttttaaaagatatcattaagaactcacaaacatcaacatagttattactgcagccggttgcattattcttcttactgatgtttcagttgccccacatttgaataaccagacccctctaagctgactcctgagagctgttggtagcagcatcctcactttctgctgtgacagtgtgtttcatgctcttctaatatattttctgccccatacctggaatcagtcatttctcaaagtagccttgcccctattaatgggaaagggtattcagagaccactatttggaattattgcttttattttgcaaatgcttaaagtaagttaacatcaggagcacgctggctctaaattcagttttcacagctatgtctgaaaatgtagtgagtctacccttgattatccgagtgattaatctttccaagggtaccaataaatgtgggttctccttgccaattcagattttcctttatttggactctgatgaacttcttacagaactgtagcctgacgtttctgtgggcactgtgactgtgtgttggatgaggtcttacttggcaggtgtcagaagcaatgatgggcagatctgcttgtctgcagtaggatgccagaacacagtgaccactgtgcttgtgttgagttgtgggtttttgtttgttttttttttgctttttttgtttatgggtacagatagttaggaagcaatggtatctcaatgagtttaacattttcttttgccccctgcgaaattgagtgccaggaaattgggctcaaccattgtgttgtcttcagtaggcaaattgggttggggggctggaaattggtcacagtcatggtgctaagttttgaagaggtttttcctagtgtggaatgtctgagcatgagcttggtcttccctgacagtggaattggctccagctttgcagaccttatcaatcctgttaccagtgcatcctacatttcatctcccaaagctggcttcatcagtgatctgtgaagtgtgatgcagaaccattgaggcatggaaaacaaatggggacctttgatcaacatggggattaggggaacaacaattattaaaaaaatatcaggacttaacatatctgtattttattatctcacattgtaaaatttcctattccttgtatatgtttaataatgtttgtattagtggaattgagcatttaaatgatcattaaataaaagtcctatacagctgcatgctcagaaagattttcctaacagggctatgttatcaagaaagtttggaggcactggacctgctttctggtcactttttctgcatcttttcttgggcagtcttttgatccattctccagtttagtcaagtgatcgtttagtaattcacatctctcttccttctacctccatgcttaaaaaccttcagcagcttcccagtacggttaagaatactggtatgttttgttcaagtgtataagaattgttttgtgtctttgcagccttgtctcttctacctcatgactagcacgctgggcctctgaatttcttggatgagtcttcttcctgcttaactctaggcactctcttttccctttgtctggtaaaacttctctttggtgctctcctgtctagccttacttatgccataggcatctggtcaagtaacagtttcttcagtaggtgtttccggattccatagagttgctacataatcctgtagtgctgtgtatttttggtgactacgggagagtagggaatttgtgtgggttctctagatccactgctgtgttgggaaatgtttaatagccggctctctgaaaaccgcagaaacctggctttgtcacattttcccatttccatggtgtaaatatgagtattatggccagattcaggctaccaaattgatgtcactgaatgttgagttgggatgagatgcatggtagcaaactgtaatatggtatttccatgataatagatggagaaggtgcatcatgtgtgtagatactaataaaatatagtaaaataattcgaacgtgaagatttttgagtattatctttgttttaatatagtttagttggaagtttatgtactataattttcttttcttttttttcttttttttttgagacagagtttcgcttttgtcgcccaggttagagtgcaatggcactatcttggatcactgcagtctccgcctcccaggttcaagtgattctactgcttcagcctcccgagtagctggaattacaggtgcctgtcaccacagccagctaatttttgtatttttaatagagatggggttttaccatgttagccaggctggtctggaactcctgacctcaggtgatccgcctgccgtggcctcccaaaatgctgagattacaggcatgagccaccatgcctggcctgtattataatttttaataattttatttaaccatcaactctcagaaattcctgaaaatttaataattctctctcatgcaatggtaggagccaggagtagagatcccctgtgccacacgcagacaggtcacatttttttgaattgattgaagacattggaataaggtaatgtatgcatgtgcttccatttttgggcatttactttgctttgcattatcaacttattcttttataacttgcatgtcttgcattgtactagcttttatatgaggagaagtatgtatcacagagggaaatatgcacaaatgcagccagatactcaacaccactccagtagtgcaactgattgactaaggcattaacattgatctaatgaagttcagtggcaggtggttggctcagaaaaatgaattataatacattaatcttgctttgtggatatacaaggtagacagaaaaaatggtaaacactttcgttcttggaattcccattttgctattcattccctcattttccaatcattgagaggtgaattatcagaaaaacgctttagcgatatttgcctgcagctactatattggtagttttgactgaattacttaatcgattcgacctaagtttctaaattgactaagtgtttgactgaaaagattctttggaagaaaatacagatgatttcacaagattatagtgacatatcgtgtgaaagtgtagattaagggtacccaacacatttctgttaatccaagtaaatgtttctgatcaggatataagagtaaatgccatcagggttacaaaagctggtgtaaaatttagacattttaatagccatgtggtaggacatttcaaatattattttctaaaggttaactgtcaatatttaggtcctataaagaaaaagttttaaaatgctttagaatatagtatttattttgtaagcaatctttctagacagaacagcccttctatattttatttccaaaaatcaaaagctgttagggacagaagtttttaagatagaaggtaagccctttttgttatagatgaggaaactagagccatgcgtgaatgtggacagccttgttctgtttgaatcggtgttttgaagtgtgtggtttaccctgtgaattaagacctgagcaggtgcgagcctgtctttgcagcagatgatcttcagccacatgcttcgtcctgtgctagcccgtcatcctggatgactcttctttttatgttgattcaatgtatggtaatgtttgcagagaaaactaacgaggcatattagaaatccgtactaatgtagatacattttgtaaaatcaaataagattgatcaccatccctacttaattcagagcaaaggaagggaatctaatttttctctttttccacacctcgtttgctgtaatgaaaatggcattctgctttgaatcatttccaaggaaatgattttcaatattgttgtctgtgacattttgacaattaaaatgcatttcttaagcctactggaaatgctgcgatgctttttcttgttttcattttttttccccccagtggttctatctgtgcttgttgcctaggaaaccacgactgggttgaattctgtttgcctggttgtctgacagactggcaaagttatggataaagttcttggctttagagttgtaaaagtgctacttaaataacagaaacattttatcaatattaaagtgctttatctcctcaattaaaaagcagccaagcatttgtttggttttcttaaaatgctaaatagagaattattgttttccttgattattattgaaacttcctgttttgtatacaaatttgcaataggatttgaattgtcacagtgagctagttctaaatatagcactttaataaaaaaatgcttctgtaaatttgtttacttccttggggagtcatgtgcatgtgttatcattcccaagagggacaaacataaacatatttcatgaaaaaattcaaagaggtgttagaaaatgcagattattttgccctatgtttgataagtagaaaaacaattatttctatataactttttcaaattaaagttagaaagaagtagtggaaatccctcagatcttttctgagttgatagaactgagagtatatagttaatggttatttaattatactttagctaaattcagtgtccttgcttaatactaaaaaattaattacattgcttaatactaaaaaaatttcagagagatgtgtttttggatgatcctgtgaccactgactccatgaagctgtagagcccttgaaatgaggcaagggtaactgaggagctgaatctaaatagccggtgtggctagtgactccatcgtctggggacttgatggaaatgcagagtctcaggccccatccagacctattcattcagaatctgtatttttcatgaggtcccttagggctgatatgcaatgctgtctcttctagagcaataattctcttctagagctgtcttggctgcatgttacaatgacctgaagagcttgtgaaagtaattcctgggcttcttcctagaccaaattttcagtatttctgatggggatcctggaaccagcattttacagagtattcccacgtcattttaatgactggtgaagtgttagaaccacatatataactcaaagagtatacaaacaagtgtgacgtttggatggggaggtcttaagtactgccctggattttccactttttgttgaggttagtataggaacagtatatgtaagaaagagttagtctgtactgagtgctaagtatattatcttaaattgactaaacatttgactgggaagactcttttggtgaaaatacacaagactatattgacaggctgggcgtggtggctcatgcctgtaatcccagcactttcgggaggcaaagatgttagtgacatactttgtgaatgtatagattaagggcacccaacgcatttctgttaatcccagtaaatgttctgacatagatatgaagcacgagcattttgttttgtgtacacacaccctctccctctgtctctctctctctctctctgtaatgtgcccttccttcaatgtaccactccccatttcttctcacaaatcccctaataataaaataaattgtgatgaattttctgtttgctcgtcttagctaaagggaacttatttcattcttaaaatgtttttcatggtctttctttttccctgtgaagaatgattacaagatccaagcatgagatgagtcattgtctaatgaatagtgtcttttcttccagctctgacttgcagtgtggttgagttcagctaatgtgcatttactgcactcctaccgtgtgatggcagtgatggtagatgtaggtgagaaaggtgcaaataaaccagagagtctttctttcagttcttggtgttcctggatttcatgcatactggataggagcatgttttctgtggcttgacgactgaggcttggatttttatctccactaattattgttagattaacttttgccaggatatcttatctctgtaacaccaagtcttcatacctgtaaaataggaatacctataaaatgggaataataatagaacctattttatagccttattctgaggatttgatcagtcatgacattaaggttcttagcatatacataacccatagtgaatgctcaacaaatgttagtgattacagacttaattggctcattataaatgatcaaggcatgtttacttttacattactctttccttaaggaggagaatgaatggtttagattagctatgaaagatctctgcactttgaaggtaatataaacagacacgcagccatatgtttcagagccatgaagtcttattgctgccttggagcaaccagttggtgccaaatggctttattaatcgccagtgtgtacagggttgtgtggtaaggaattaatttgaaactggaacagttaagacagagaagtggataatgagccatttgaatgtttttaaagtgcttccgtcatactccccctgtagaaaataaagcttttcaacttccggcagcatccgatcctttacttcatttttgttcctagcactgatctcttcgtggcgtagtctgtgttcacatgtgtatgctttgtcctgtcctcaccagaatggaacatcctggagggattattggccttccagttcaaacgattcttctgcctcctgcctcagcctccctagtagctgagactacaggcatgcaccaccacgcccaactaatttttgtatttttagtagagacagggtttcaccatcttggccaggctggtctagaactcctgacatcacatgatcttcccacttcagcctcccaaagttctgagattacaggcttgaaccattgcgcccagctgtagatatttgtctttggaagaaagactttgtaaacctccttagaaagcttttagtggggcgggcaagcggcggggccatgcgcatggcatgctgggctgtgggcgctggctgctgggaacccggcagaacatggccgtgcatgtgtgctgaagggagaggtggccacagagatagcgtgttcctcatgatcaagtgccactgcatcaccatcttcacagatgccagggtgtctagcatggtgtttgagttgaagtgcatcgtcgagggcatcctcagcagctgtacagggatgaccagctcttggatgttggcaagacgctgggagagtgtagcttcaccagccaaagtgcatggccacagccccggccacagcggtgctgggcttccaggcggacgacggccttgaggccctgcacatcccatggttaggaagccccaggacacaggaagcagtgctcacgagcaagccgtgcacagagggcactctgcgtgtccgtgagaggcccacttcccccagtaaaagagatttagatgtcgggggcaaaaaaaaaagggttttagtaccatgaagattcatttgcatcccagtgcctgtggtcccagctgctcaggaggcaggggtgggaggatcccttctgcctgggaggttgaggctgcagtgagcccagattgcatcactgcactccagcctgggtgacagagcgagactctgtctcaaaaaataaataaataaaaataaataaataaaataaaaataaaaaattcatgtgcaagatgaaaagcccagctctgataaaaatgaagtatggagattacagtggaagtttaacacctcatagttgtagagaggcttgctgctgtgaagtaattgttgatggtcaacatacactgggataattatgaaatcttgtaaagtgcaggagcttcaaacgcacatcctgaggtgacagaaaactggcaaatgaaattggcaaattgctagtccccaggtaagagaaaaagattacgcttttatatagtattgtggagtaaaggttataataataaagaaatgggggaataatgcttgacagttactgctgtatttgaatccttaataaaataatagaagacaaatgtcaaaggagagggcattgagcatttagagaatatctgcaatgcaatcaatagtcaatgtcaatttttgaaagacaaattacttgttagatgaagttataattttaaaatttaattacatgattgttgaactaaattggtaaaatgaaagtgatatgaggaatttggtgcagatatacctataaaattatatgtgaagaattaatttagattgactcccactcagatattctcataagggagtcagcactgcatgaaggaccatagtgcaaaattaatagttaaaaaaaaaaaaaagtaaaacctggatgggatttctagccagggagtttatcaccaatatttgaagcggcaattctttgtccttttcctggtagaaaacccttttttttgttctctggggccttccaacatctgtaattgtttctttgctacagagattgccctttcaatacttgagacaatcaatgtgaaaaggacagagatagatggaagtcctgtatctcaagatggaagtcattcattttcttaatttatttatacagtaacactttaacaaacattttctcggtgtcctttgctggattaaaaactgggggtagaatcacaaaatttaatgaggcagacagatgagaaagtaccagatctaagtgaagtcaagcatgatttcacttagtctgtagaaaccttttaaacttctcagagatggcaatgcctgcccggccgaccttagaaaagagagtgagtgagaagaggcccagaagagagaacttggaagcctctttggccttctgtagttgcagagtgttccagttgagtgtaagggtgcagagacattgttcagctcacagaggatacaaaaatggtcttgtgccccaagcagaccgaaaattctgagttatgacgtctgatttgtggtttacaaaaggtatcatgagtgctttgtagaggatgacttggagacggccaggcctggagagagagaataaatcaagctgagaaatgatgaggatccgtgactgccagtatgaagttcacatttttaaaaatcacagctgaattatatatgtgtacatatataatatatttattttatatatagcaattatatgtatatagtatgacatagccctgctgctcagagtcacaaaagggtaatggtcactcagaccagcagcactgatgtcaccaggacaatgaaatgcagaatttcagatcctacccattccagacctactgaagctctttaacaagattcctaggtggtttctgtgcacatcaacctttgacagtctctgacttagaagacactgagttgcctcatccaaagctaccttgtttgctttgtcaccttctaatcacattgtttccaatcacatctggtacagccatactgaatttcttgtagtttctttaattctcttgaatttcagtgtctggcttttgcacatgcagttttctctgctcatgtattgtcttccttctgccccattcatctggccaggcaccaccaccattgccctgaaacaaaaccaaaacagactgtaaacaaaaaataaaattttaagacccctaaccaactgaatggacccattcttggccaagaacataccaatgtaaacctgaaaactagttcgggccatgatgggaaagggggattggatgtacctttttataccctcctccctttggaattcaggtattactgaccagcattaacattaaaacaggctggctcgtgcctctaatcccaacactttgggaggtcatggcaggaggatcacttgagcccaggattttgagaccagcctgggcaacatgacactgtatctacaaaaataagaaaattagccactcatcgtggcacgcacctgtagtcccagctgcttggtaagctgaggcaggaggatcgtgtgagcctgggagttcaaggatgcagtgatctacgatcgtgacactgctctccagcctgggtgacaaagtaaaaccctgtctcaaaaaaaaaaaaaaaaaaaaaaacccaaaacgtttaaacagccacattatagtctctttgtagcaataaaatatataacaaaatgacaggtagctggaccttaaagaaatcaaagtattttaccccaaaatatatttctgtgatgtattttgaaatggccccacaaatctctctcgcaaggagtctgacacctttttaagtctgattaaaaatcatttaccatctattctccctgaagcctgctacctggaggtttcatctgcatagtaagaaccttgggctccacaaccccttatattaacccagatactcctttctgtttattccagatctttagataataacttaactctttcaaccaattgacagtcaaaaagctctgaatctatgacccggaatcccttgcttcattgtcctacctttccaaactaaaccagtgtacaccttacatgtattgattgatgtctgcttataacttctgtcccctaaaatgtataaaatcaagctgtaacaaatcaccttgggcaattgttctcaggatctcctgaggctgtgttgggggcatatctttaaccttggcaaaaatgaacttttttttttttttgagacagagtcttgctctgtctcccaggctggagtgcagtggcatgatcttggctcactgccgcctctgcctcccaggttcaagggattcttgtgcctcagcctcccgagtagctggcgttacaggtgggcaccaccacgcccggctaatttttgtatttctagtagagatggggttgcaccatgttggtcacactggtctcgaactcctgacctaaggtgatctgcctgccttggcctcccaaagtgttgggattacagatgtatgccactgtgcccggcctaaacttctaaattgattgagacttgtctcggatacttttaagggcctggcctctgtggatatgacagtgaaaggtgaggttgtctaggagtgggttgccaatgaggaggaaggtcctaaaacctaggagggcagcatggcaaacacaatgacacgatctggcagccacgaaaggagcttgtggaggagtggtcagaggctttccacaagaggtggcctgcaggagaatgcaaaaggttcataggtaaaatttagcagttatttttcacttgaagtctttgctaaagctcttaaagacagtgcctctcttagatgttcctgtagtgctgtgtacttatgaagcagcaggatcacgctgaagtgctggatcatgtctacattctccagggcactgaaaacttcacgagggcagagaccaggtctatgttgtatattatgagatcctagggacatggggctcaaaaatatgggttgataaagggaaagacatttatggcactcttggcaaaacaacaacaacaacaaacaacaacaacaaaaactatgttagttgagtactcgagaggagcaatgaaacagcacactcctgtcaaaagattgcctatgaagaaaataagcacaagagcagtatctggaatggaatctgacagagggagtggtatagttcctttaaagatttatgagagtcgttcatttagcaaatatttacctaaaattctcatgctttgtgaagtccgtatttgtgattttagctgtttgctaaaatttatttgtagctcctaaattaatactcggggcacctttgtgctcattcatgaacatgtgttggatggcaaacagtttgagtcacttgactaatatgtttccagttgaggctgaagaatgggaaactgccttcttgctctggttttcatattttaaaaaagtgtccttttcatgggctatttggtgccatgtttttcgtgctttttgctggtgattttgctgttaaaatggcgcccaagcataataccaacatgatgtctagcattcctaagcacagttagtctgtgatataccttccggagaaaatatattattaggtaagctttgttcaggtatgagttatagtcctgttagccgtgagtttaatcagcaatatatattaattaagatgtctttatacagatcacacctaaggcaaggctctgtattgaatggtgaacaacagggttgtggtcagaggctccacctaaccttgtatttctcctaggagcagtggttgagtatttgctaattcagtgtttacagttactttatataacataactattgtgcaaaactagaatcaactgtatttagttttccgggcactgttttgggcactgagggtgagacagtgaggaagaaagatacgttctatccccttgtgggtcttacattctatctggggctgttggccatatggaaatagaaaggtagcacatctcctactcagcacatatatgaggaaaagcaatattataaataacaatagcataagcttccccccttttttctgtttttttttctctctctttttttttttttttttggtgacagagtctcactctgtcgtccaggcttgagtgcagtggcatgaaatgggctcactgcagccatgacctcccaggctcaagcaattatcctgcctcatcttccagagtagctgggaccacagatgcgtgccactgtgcctagctaatgtttgtattttttgtagagacgaggtctcactatgttgcctaggcaggtctcaaactcctgggctcaagtgatccacctgcctcagcctcccaaagtgtcttttttctttctcatgttttgttcatttttgtttatcatctgcaagagaaacacatttttgtttgtttgttttctgagatggagtttcgctcttcttgcccaggctggggtgcagtggtgcgatcttggctcaccgaaacctctgcctcccagattcaagctattctcctgcctcaacctcctgagtagctgggattacaggcatgcaccaccacacctggctaattttttttttttgtatttttagtagagacagggtttctccatgttggtcaggatggtcttgaactcccgacctcaggtgatctgcccgccttggcctcccaaagtgctgggattacaggcgtgagccactgcaccttgcattttttttttttaattttaaggaaaatagctcactcttacctgttcacatgcccctctatcctccctctaacttgcttcttttttcttctctcagtttctttccaccttatattcccctggtctcagcttcaatctcctcattgctcattaaggtatgtttctgaaagtacaaaaagaatctagaaaaataattccataatattctctcagtgaaagtctctggtaccaggtatgtaaatacctttagttattttcatctgggcttctcatggtatttagtactcttctaactgtccctgttggacatttactaacatttgccttttacctgtcctgagccagtcgctggggagtagcaatctgttagaggatttgttcctttttgaatggtcagaggcctggggcaggggctcacacctgtaatcccagcgctttgggagaccgagacagcaggactgcttgaggccaggagtttgagaccagccttggtaatatagcgagacccattaatttaaaaaatagaaacattagccaggtcgggcatgatgactcatgcctgtaccagcactttggtaggctgaggcgggaggataacttgaggccaggagttcaagaccagcttagacaacgaagtgagaccctgtctctacagaacataaaaaaattagctgggcatggtggggggcacctgtgggtccagctacatgggaggctgaggcaggaggattccctgagctcaggagctcaaggatgcagtgagcaatgatggtgccactgcagtccactctgggaggcagagtaagatgctgcttcaaaaaaaaaaaaaaaaaaaagataaaaattagcagggcacagtggtgtgtgcctgtagctgagcatggtggggggcacctgtggtcccagctacataggaggctgtggcgggtggattgcttgaggccaggagttaaggctgcagtgagctatgattgtaccactctactcccatttgggagacagagcaagaccctgtctcaaataaatgaatgaatggtcagaatgggattcactttagagtgattttttttttctacttttctacagtaaatgactctcaacatcttggccccatatttattagttttgaaaatcactaggataatgatgtctagttagatgctaatcaaatatgtattggttgaagtagctggatggtagctctcccatagcaaaataaggacaccaaaatatatataaaagaggaaaagtcattgttgtgaactgctgctttccatttgctctctgggtggccagatcactccctgatgtgtctggcaggggctcaactaacttttcccctgaactgtactggcttagcaaaggacctggggataccacgtttttatgcacaggattcagtagccaatgcctgttttgataagtagctggtcatttacatcattgcctcaggccaggtccttcactctcgcctgagaggcaggaagagagaagtcaaaggcttttcacctctgatgtccatttcttatgccccttaaccactctgttctaccctggggatgaaaggaaaggagtccctgaacacacactggggcctacatgagggtggagagagggagagggaaagggaggagggtgatgataaaaataaataaataaataaataaataaaacaactgttggatactatgcttattacttggttggtgaaatattctgtacaccaaacctgtgacacaaaacttacctgtattagaaacctgcaggggctgggcgtggtggctcacacctgtaaccccagcactttgggaggctgaggcgggtggatcacctgaggtcaggagtttgagaccagcctggtcaacatggtgaaaccccatctctattaaaattacaaaaattatgcagatgtggtggcaggcacctgtaatcccagctacttgggaggatgaggcaggagaagagcttgaacctgagaagcggaggttgcagtgagccgatatcgcgccactgcactccaggctggtgacagagcaagactccgtctcaaaaaagaaaaaaaaaaaaaaaaaaagaaaaagaaacctgcagatgtacccctgtagctaaaataaaagtttaaaataaaaataaaatattggaatacatctatttaaaaaacgaattgggaagtatttttgttcctgactgatatatcttagccaactttaaaacattttgttcctactttgttggggtgtgtgtctagagtggatgagttgtaaaaatgaatagagtcaatacttgtcctctagttgaataactggccgatgctgttaaaagtagaaacaggttgggcgaggtggttcatgctggtaatctcaaggctttaggaggctgagatgggagtttcactttgaggccaggagtttgtgaccagcctgggccacactgtgaaatcctgtttttacaaaaaataaaaaattaattaaccgggagtagtggtgtccacctatagtctcagttactggtgcagctgaggctggaggagcactaagcccaggagttccaggctgcagtgagctgtgatcttgcactgcactccagcctgggtgacagagcaagaccttgtctctaaaaagacaaaaaaggagaagcaaggtgcagtaggagaaagaggcagaggaattttactagtacgtctgagctggattgtttcctttgatcctccacacctatctgtgctctgctccatatgccaagaggccagcccctcacactgactgtccaggctctatgccgtctgccttgtgcctgcaaggactgcagcagcagggcattgacagaagtggaaagatggaaaaggcaggcttattcagccttcctggctgtggcttttgtgcagctgtggccctctggggaatgtcacagctccccttgcctcatgtgagcagagggcactataccctttgttgtcattccttaatcctgccatatattagaaacagtctttctgctaaactgtcctcaaagacccctctctgagtccgcaaaacacttggtgccaggacacaaatactagatctgatgggttggaggaggtgctgtcatttgaggaggacttgtagagtacaggacacactgaagtgggtggagaggagggcaaaggttcctgataatggaagttgcagcactggtgcgccatgcagttgtctactgtggtgcatgttcagggagctgtctgtgtggacaggctacagggcaccggcagtggctgtaggggctaaacattgggtgataagaagaatattatcggaaataatgttaggaaggtaccctaagtctcgattgcggcaggccttgacattgagaatttgcaactgggattttgtttaactctttgtgctttaaaaaaaatttaaaggctgggtgccgtggctcacgcgccccaaagtaatcccaggactttgggaggccgaggtgggcggatcatgaggtcaggagatagagtccattctggctaacacagtgaaaccctgtctctactaaaaatacaaaaaattagccgggcgtggtggcaggcgcctgtagtcccagctactcgggaggctgaggcaggagaatggcgtgaacccgggaggtggagcttgcagtgagccaagattgtgccactgcactccagcctgggcgacagggcgagactctgtctcaaaaaaaaaaaaaaaaaaattaaatttgagctaatcatagaatctgatgcaggtataagaaatgatacagagagattcatttcaatgataagattttgagaaaagttcctgttctgtcacaaccacaatattaacatttatataacattaatatacagcctttatataaaatgtatacaatcttattcagattttttcttgtactcaggtgagtgtttagaagatttttgatcagagtggttatattgtcagtttcagagtgagaattgtaatggtatagatttaatatgcctcagaaaaatgcttggcttttggatggaaacattaatatgtcattagaaaattgcatatattcacgcctgtaatcccagcactttgggaggcccaggtgggtggatcacctgaggtcgggagtttgagaccagcctgaccaacatggagaaaacctgtctctactaaatatacaaaattagctgggcgtggtggcacatgcctgtaatcccagctactcggaaggctgaggcaggataattacttaaacctgggaggcggaggttgcagtgagccgagatcgcaccattacactccagcctgggcaacgagagtgaaactccgtctcgaaagaaaattgcatatgtttttttccccttgactttattttccctccttatgtgtgttggattcagtgcaaccattgaaaacatcctgttatccacagaaatgtatcttaaacttaccattaaatcacctgttgtttcaagtgcaacatataggcatcttgtacttttgatacgttttatttttgtctggatagcaatgtgatcagatctgaattgcacagagtcaattaccaagtactcccaatgcagctgggtcttcttggagtatagtgattgacctagcccttaaactatgtttgtggtgctcattgcacttatctgtaaaatgtaatatttcagtttatcactaagcatcttccaaccatagtatcctgtatttattgcttatatagaaaaaaaatttaataacaaggtgataagattcatttttatatccttctctctgagtcatttgttgcttttcaaagcttatttcttgccctgccttccacaaatttcttccaaagattctaggaaataaatgaagtatggataaatacctttatgaaaaggagtaacacatatctgaaggttggttttgcaatcgtgatgacaggtttgtatccccacagcatgtgataataacttggttcttcccatggttagatgtctctttaggaaatgtatgattgccctgaagatgggagagagacagttttcattttgcatgaagagtaattttgctgtttgtatcataagttctaaaagcacacatgtaactgcatattatatttagattcgattaaataccttgatgatttatgcctgtcttcttggcagagttttattcattgccttaagtggttaaatagttgaaaaacgacttgaagaatgaaggaagagagacattgggcaagttgatgagaagaaagggtgggatatttaacagttaaaaatgtatatgtctgccctttggtatttgctctaattcataattagatcaccatttcttccacttatttaaaaggcaccttacctagagagagacatcaatatttacagtgcattagtgccatggagaatttcagatcttgtgatgaaggtttattgctgttttatcccctcttcaaagcagtgtacacatcaaacagtctccaccctcattctggacccagtgacatcgcaccagtcgctctgtgcttcatgcagcagcttaattattgaagatccttgtctttgaattttctttttaatatttcagaggatatactttgaaaatctatatattaaataaatcagaagattatgggattagaaagttttatcatattttaaaatgcatcagttttgctaaaatttgagataaggagtggccataatgtgaccaaattaccttaaatgagaagctcctattatttctaattactgtaatgaacacaaattacatcagattattaataatgctgaaataggccatgggccccagaaacgtagcaaatcataggtgagaagatcatgttttattcatccgaggccaaagcaaaattaccttctttatgcaatgttatattagtcaggacagttagaggtggggaaccttttaggtgaacttttagatgaatcaggcagttgtgtttcatgattcattttgttgataaggccacatatttatatgaatgtctttccttaaaataaggtgaaactcgtgaaaagatctcatgccatttgtgactactactgcaccattctctagaactctgtgttgcttgtcgtactttgacctgttgggagttaccctgagcatggctgctgagactgctttgcagtgcttttatgtttttttctagtacatttttcataaattattattctctcaggatgaggtttggtggatgatcactggttgggggtatatgaacatatgtgtactcgcacctttttggtattaaagggaacttctaaacccagcaatgcagcctctgaatttataaattagggatggaggcccagagaggtgactgatgtgccagtatcacaggtctaggccagtggttcttagcgtgtggtctctgggccctaagggatcactaagatcatttcaggaaggccataagtgcagtactgttttcagagtattatgaaacgcgattttgtgttgttcaccgagttgacatctacatcagtggtgcccaggacctgaggggcaaaaatgtagagatcacttggcacaaatcaagacggtggcaccaaatgtattctttaccccacacactcgcagtgtttttaaaagccattttcacccactgtttttgatgaagaaacaaaattaattacttaaaatctgacactttaatatacaatttaacattttgtgtgatgatgtcggcataaaacacttctccaacatatggaagctcagtggttcctttttaaattttaattttattttatttttgttgaggtaaggtctcactgtgttgcccagcttggccttgaactcctgggctcaagtgatccttctgcttcagcctccttcagtagctagtgttacattcgtgagccaccacgcccagcttctcagtggttgtcttgagaaatacttttatgcgaaggcttgatttacatggtgaggttttctcatagaacagcgttttcatttgaaatacggacagaaaaactggttattcagacctgagtgtctggcagagagtttattaaaaatgagtgacacaagcctgtcactgtaaggcaaaaaatgggcaatatttgttgctaaagataaaattcaaactttctaggtaaaattaggttttggaaaacttatgtcccactgtgagcatgactgcttcccagtacataaagatatttctgattaaattggcagagatattaacatgtgattttctgaaataaagaaatgtatcaacatttggaagattggcataactcagtaactaatattttccaaatgactaatgttatggaatttctcgtgggtagaagtttaattcaaaatgtgagacaaatagattttaatgtaacaaagaaagaaaacttcacattcacattgtagctgacctttgagaaaccaccactggtcgagttatggtgtggtatcacagaagaaaatctaaaattttctggaaaagctattaagatattattccctcttccagctacatatttgtgaagttctgtttttcctttatatactttttcatatggcagctgagaatgcagaagcagatatgagaatccagatgtcttctattaagcaaaatgttaaacattgctgctctttccactaaatgtgctttgttttataaaatacaattttcataaaattgagttgtgttaacatgtgatgagttttattattattaaagtgaattaatacatattttaaagttgttctcattttcactcctaaaatggtaaatatcactagctctaccctcccataaacaaaaactctttgaggtcatcaatttttagagtgtgaaagggccctgagatcagagtttgggaatcactgaatctagtttgtttccttgcaggcatgctttcctattttatatgtagtacttcctccatttaatgatagatttttttccttttcctatcttaacatttctgaaatttggatgtctcttacaatatatgtttatggctaatgtaacgtttcttcctcttcccaaaatgaaatcgttctatgaattaaaatcaggatatgatttctcagtgcataattctactaggaaaacaacaaaattcttctcttttaaaaaacaaaccaacatttgtatccacaggtagctaggaatggaacttaatagatttgatttcataatttgtgatttgtgattgagcactggctcaggagcctgaagtcttggctggaaaactgacttttcatgtcatctctctgagcctcagcttactcatctgtgacgtgggtcgcatgtttttccatgtgtctaatgtagtgccttatttaaataaaaaaatttcagatccctccgtttaagtggtgggttctagtacactgttactaaactttgtgcacgcgtgtgtatgtgtgtgtgaaaactccataaaaatgccttataattttcatgcaatcataaatccaagaagaaatcataaaccaatacacatccagatgtgtaacagagatccatcagatagaagcacatcattgtgagagatgaagaagtcttgctgagtctaaattgtaggctgtatgaacctatacctgccccggggtctatttatttggacctgggttatgctgcctttatgtactgtgatgactcaggtcttacagcacttccaaccataagaaaaccttgatttcaacatcattatgatgtcatttggccatcctttgatgagaaaatgctgttgagtgactgactgacagggccttgctctgttgcccaggctggagtgcagtagtataatcacggctcactgcagccttgaactcctgggctcaagtgatcttcccacctaaggctcctgagtagctgggactgatgcaggacatgtgagccccacagtggggcttagcccataaaggtccttgtgtttgcccaggaaagaattcaagggcaagctggggctagaagaaaacagctttgttgaagcaacagtgtcgcagctctgtgactgcttctgcagagcaggggtgctctatgggcagagagtagcagcccagggcagttttgcaatcatatttatactcacttttaattacatgcagattaaggggaagtttatacagaaatttttaggaaaggagtagtaactgggacattaggttattaccacggaaacagtaggtaacacctaggtgttgccatggcagtagtaaactgacatgacagctggtgagtgtgtttgatggaaaactgcttctgtcccagccctgttttagccagtcctcagtttggtctggtgtccaagccctgcctctgcagtcaagtcctgcctcctacactaggactacaggaaagtgctaccacagttgtctattttttttttttttattttttgtagagacaggatctcactgtgttgcccaagttggtcttgaactcctgacctcaagcaattctcccactttggcctcccaaggtgctgggattataggtgtgagccattgcacctggcctcgttgacttgttttattgggttttgttctttctcatcagcgtggtaatcaaatctaggactccttcctgaatttgacagtggacataaatgtaaacgtggcacctgaaattgcgtgggagtactcagtgacgaggtagtgcaaatagaagatccagactgtatttattttaatttattttataaatattgctgaaatgcaaacaaaaagtttaatgttggaagaactaacaagaagggctgcatgatagagcattcgctgtagcagccttcacattgcagtttatgcaaacaccaccctatccatgagctccatcacccaccataagagacatcccgcagggcctggagctccctctgttatcttcctcttctcaaatcccctttcccccagtccatattttatttcgagagctacaggtatatagagataaatgctaattatttttgtctgtctgttgcagactaacacattaacacaatgtttgtgtctaatcttaagaagatggtcttaattatttaatcaaaatcatgtatgcaatgtattctcctgaggaaaatttcaaacacaagtagggcaagcagttttattgtgtccaagctaattcagtccttgaatttattggggggttagaatatacttttctttgattattttactatagatattgggtactgcttttggtcctatgtttgtgctattttttaaaggcctcctcttctgagttaatagtgcctcttgtagacttacatacagatgggtgacagaagagggagagaaatggaggtgtacagaggtacctaacaactgaataactaaccctgtaattggacagcaacagaatctgtgtctaagtaataacattgtctaaaagtttttagagttttcctgcccacctctccccattttgttgcttttttccttacagtttttaatttgatgattctggaaattttgcttcctcttggtagagaactttccttatagtaagggcattgtaatattaatgcatatcaatttttagatgtgtatttttgcgaccttgttctaagagtgactatatagttcttattggtgtttatttttattttggggggtgtaaattaataagcagcaaaggttgtcatgaatgtttacagacactaaaatccagaaattattaaaatcctcatgtttatgtttctctcagcacattaagatagccaccaaagtattaaatttggagttgactaaatttttgccctagtaacgttgctcagactgtgttgttattattgaatcctcatgatgtagaagtccatgttaaatttgttattactatgtttcatatgcttctgtttgctctgataagttctaatttgctttcacattggagactattggattgacagtggtttaaatacagctttcactgtatataaatagcctgtttggtatcctcaaggtttccatatctttaccattgaccagtgcaccagtgtttcaaaaatatccctcctagaacaaatgatgagtttactgcttcatggttaaagctatgtcattagaccggacgtggtggctcacgcctgtaatcccagcactttttggggccgaggcgggtggataacctgaggtcaggagttcaagaccagcctggctaacatggtgaaaccccgtctctactaaaaacacaaaaactagcttatcatggtggtgcacacttgtagtagcctgtagctactcgggaggctgaggcaggtgaatcacttgaacccaggaggcggagtttgctgtgagccgagattgtgccactgcattccagcctgggtgacagagccagactctgtctcaaccagtcaatcagtcagtaaaactgtattgttagaggctttaaaacaaatacttacatcctagtttttaaaaacagagtattctaaacataatttaaattttgtcttatgtttttgagtgatttcactcagttgctgagtggaacttttagttctgattgcagctattgcagactcttttcttcttcactttgcatttttaattctgtttcttctctgctgtgacagtgatcctatttgccaggctgttctcattgttactgataatgatacaaatgttcacctgagtgtattattgatactgttatagcaattgcaagcaagctcttctatgcaaatacatttgctaaaatactacctttcgtgtaattgtatatgtgagtatatgacagaaactacctgcagattaacatattactttgagtattttctgtcttaagtataaataatatatttgggcactacactttctgacaatactttattgaacaaaagaaacattttattcaacaaaatttttcagtagagcagccaaatgtctagattctatagatttttaaaaattgatacataattttatgtatttacggagaatatgtgatgttttgatacatgcataccatgtgttatggtcaaatctaggtaattaggatattcacacctcaattatttatctttttttgtattggaaacatttcaaatcctctcttctagctactttgaaatatacaataaattatttgttaactatatagattctgtgtttttattacagtagatatgattaaaaggtaggtgaaatttgtttacttgcttagattcattattttttaaatgatatatgtgatgattatttagaaatattggggtaatgatcacagtaatggttattatattactctctactgagtacacactatatgtctagcactgtttaacccctttatattatttagtccttacattaccctgatgaaagaggtactgttttattttcatttgagttggaaaggactagaggcagagaacagttaggcaacctggccagggccacatagataacaaggagtgaagtccaagtacaaacctgggccattttgctcggagccgacacttgaccgcatctctttcaccgtgtagtattttaaaggacctaaaggaatttgtgtttagaatactgacccacttgtccccttttacaaaagtgtaattctgttccttaatctttaggatttccctacgttctcctaacatgtagtttaccaacattagtatcttatttttcagcatagtgcttttgtgtttacagatatgcctcttcatgttcgacgcagtagtgacccagctctaattggcctctccacttctgtcagtgatagtaatttttcctctgaagagccttcaaggaaaaatcccacacgctggtcaacaacagctggcttcctcaagcagaacactgctgggagtcctaaaacctgcgacaggaaggtaaccacctctgcttgtttgctgctgtctcttgcccctcctgacttcttggtgtccgtgatgagtgtcgtgtcttgggtaaaccattggattccagggcatcttcatgatggccttttgtgagcgtggtaccaactttcatatcaaagttcagatagtctcctattttatatcacacttggattttctgatgaaaatcagtgccgtgtatggtgtgcacttattaatatatccattttttgaatagattccatttcatatcgttaaaaatgaaaacattcaacacattatgtgccatataaagtccctttcttgctgtgtctcctggtctcctctcccatttctcctcacaggcaacctctttatttgctttttctatgttcttacagggatatttgacacatttataagcaaatatttatattggttcatgaggtacattaaggaacttagaacattatgaacttttaaggatgaaagtggacttcatggtaatttagtttgattacacagttgatcgttttatcctaagtctccttgtaaatggaagtgtgttgtctagtcttcataatactttcttccctgacctaatttattttagtccttgacctaatttatttaatctgaataaagaaactttattttagcttgttttgtctgttttaaaaaatttgttggctgggcgtggtggctcccacctataatctcagcactttgggagtccaaggcaggtggaactcctggccaggaggtcaaggcccgcctggccaacatagcaaaaccccatctccactaaaaatacaaaaattagccaggtgtgctggcatgcacctgtaattctaactactcaggatgctgaggcacaataatcgcttgaacccaggaggcggaggttgcagtgagccgagatcacgccgctgcactctagcctgggcgacagagtgagactccatctcaacaactaaaaaaatgttgatgctctttgtcagaacccttattgttcctttttgtcacgcttctcacctcttatttaatgtgctttttgctgaatctgtcattttcacttttgaatctgtagatgctcaataaacttctgttgaaagaattaataaacattttttcagtgcagccagtaagttagcacagtatatattgagaaatgtcaaaataatactaatcacataagatgaaaaagatgtagcttgatatttgcttgatttattctttgcataggtataaaaatacctgttttaaatatttctttcaactttggtttgcatttcagcacactcctctctgtagtaattctagtgacaaaaaaagtacatggaaaacataggtttaaactgagaagaatctagttgaaaaaaagagtatatttagtttctggtttttttttgaattatgaacttaactgttaggcttagtctcctgaaatactttgtttttatagatgtgttgaggagccatattggaagatcttctcattaagattagcttgtaagttttgaggactttatcttgcagtagactatccaaagaagcagaatccagtttatcagtgggtctcatggcagttaatctttttttagaacagacctaatttaatttacatggatattcacaaatgtgtaaacaagtcaagctggcagtttaaaaaaatttttttaacttggttttcaactgtttgaaacatacggaagtttcttttcaagtcattcaacatcttggatgtgtgagtccgtttcagttgcagcaaacagaacgtgtttttatcataaaacatttttgaacaaaaggaatttatcacttagaatgtttttctcacaaaatcactggaagggtttgcagagcaggtcctaggtggtcctggagaacctttaaaactatgcagtaacaaacatgtggcttgcctgtggagctaccctctctgctttcgtggtgaaggaggtgctgcagtccaggggcctgaactcctcccaccggagcctgcctactacacactatacaccaccctgcctccaggtgtactcaacttgcttctgtcacttgtgaagctggagacccaccctagaaatgctgccagtcatcacagcccaggaaaattctgtttcaaaccactattaaaatctcatgctactgaatctgagtaggtggagttcagtttgtatctagacccttctctgcagaagagcctgggaagtagaacattagccttaaaacctctgcagcacaggaacacgttaggagagcactgagactctcactgccaattaaccacatccacctagctgacgcagtttcatttttaaatatttatttatttatttatttatttagagatggggtcttgctttgtcacccaggctggagtgcagtggtgcaatctcagctcactacaacttctacctcccaggttcaagcattctcctgcctcagcctcccaagtagctgggtctactggcactagccatcacacctggctggttgtttaatttttttagaaacggggtcttgctgtgttgcccaggccagtctcaaacttttggacttgggtgttcctcccatctcagcgtcccaaaggctggaattacagacatgagccaccatgcccagcctgttgttttaaatgacatgctactatcattgtagaaaatttggcgaacttatagaacaaaataaaattattcataactccagaacccagcaacaaccagtatttacacacacacacacacacacacacacacacacaagttggagtcatgctatgttcatatatttgcatcctgattatttcaacattatttttcgtacaatagggattttccctggtgtgaattttattatcaatattttaatgagtgtaaaacatttcattgtagattgtattctgttttctctcaattttggacatccatgctctttctctttttttcacattttaagtatcagtgttgtgagacatccttaaatataatatttatcttaaaaattgttaaatattcagcaatctttttacttccatggagcagtatttaatgtaaccagatgcccatactttcccataggaaaagccttgatctacatacatatttttagatgaagtgatattcgcatatgatatacttaaatagtaatgtgtaatgaattagtattttgaattttcgttggctttactcttcaaatactaatcttgctgtctgcgttttatgctgtttgtattttagtctgagagctcatatataaatatgattagatggcattttattttcagttataaaaagcctcctcatcttttcaatattcagaaggaaggaaagcatacttgctgcttaggtacaaagcattcaatttatttatttctgttaagcccaggagagcttacctatggtctcatgctttaagatgttataaattcttatgagtctgtagtggttcaggttttctgtataaaattgtagaaataaattagttgtgcattcatagccctctgatttagtgatctctagtggttaaaataagttaacattcttaaataactcatctacatagttaagtggtttatattcttccaagttaaatgagcagagtaaattattttagaataatgttaccaatcaattaaaatcttgtttctaagcaggaaagttgtattctgatatgttagagcaccatcatgtcaaactctctcctttggttcaaaatcacaaacgagaggtggagtcttccttgttgaaatagtggtcataatctcattccactattagcttagtgggcagagtgtacagatgatgatgatactcagttgcttgagggcctgaagaggccgagggtcccataggcttctgaatttcttaaaatatttcatgttttcatttggaagtgagatggagagggtaagggagttgtggcttttttcaaagttatttgaaatactcacctttgtgtccagtattttgtggctgactaccttttccaactgttttagggaacattttgctcatactttgtgtggaaagtttcttgctagaggctgtattttcatttgagagttaacatgtggttaatattttatcctgaggaagagtatttcaatcggtgtgaatacttaaatcatcttgccacctctttggtcttccttattaagtcagtgttgctgtgaataaagaggccagctagtctgtggagagcatgtgatttatcccatcaagaaagatgtaatgagctcttagaagaatctgctttccatgcagtgccggggataaggactgtggactatttcactgtgcagttgctacaagccattgttccttccctctaaataatgagtggcattgtttttgtaaatgatatttccccctaaacaattaacataggtagacttagtataaaaaccaggtccggacaagtttccaaaagagattctcacctgattagggaaaggggaagaaagtaataaagggaacctattgcattggcatcattagcttccttttcttttgattttttaaatggagaccttgcaatgtttcttaccccttgggtttattatttctgtttggtttagttgcttagcatgtttgctatctttccaatacccccgatacacacaaccacttgtaagagatgctttcttagttatgtctttgtcatctcgcttttctttctattagaagggtgagatgttttgtctaagtttaggaaattatttttataaacatttttgaagtatttttcaaggttccccaacccccttttttttccctgatagtaatacagcttgctctttgcatatgtacggtaatgaagggtatatagaagcagggaaatgccatcaggcttctgtgtccatgggttctgcatccacggattcaaccaagattagattgaaaatatttggaacaacaacaaaaaaacaatggttgtgtctgtactgaacacgtagaaacttttctttgtcctaatttcctatataatgcagaataacaactatttacacaaagcattttctttgtaataggtcatataagtcatctagagatcatttaaactatatgggaggatgtgcatgggttatgtgcagtagtccaccattttatgtaagagacttcagcatctatggattttggtatctgcaaggggttctggaaccagtcccccatggatactgagggatgattgtaatttgaaattttgaagatgagtagtaatgacattttgatgtattaacttcaggacttctgtggagcatggctctatacagatgttggctattcttattaccagggggaaccatccaagtatagtttaatttcctgcaatgtttccaatttctgctgtattgagagaattttcctatgcctcataaatatggatagtttacataatgttatattatgtgttgagttcttatagttaatgtttaactttatttgatggttttttctgttgtatgacatttatatttttgccaattttgtttgcttttataagtaacctttagaagtacccttcagagaatgtccttatttatcaatttatgttggcatctctgattattttctttgactagattcctccagtagacttatttggtaaggagatgaacatttttaaagctattagtaattgtttcacataaattctaggctaataaagtatgaagtagttaggatgtataaaatgctctgagaagtcctagataaataggataggagtgaggcttgagggtggtggtgaaggaaacaagcagctggtactattcctgagttccagaacttactgtcttactagatagcttaaaggttctacatgggtgtgcatcagaattacctgtagacttccaagagctgaaacacaggcattactcacaccaacagattcctttacccactccagaaaatttgtgtgcttccttaaagctcttctgtggttttcagggctcggtcttttttttttttttcccgcaggacctcgggtctagctgaaaacaaagtatggttacattttaagggagagcaaataggaatatagtcatgccttgcttaatgacagagatacatcctgagaattgcattgttaggcgatttcatccttgtgtgaacatcatagagtgcacttacacaaacctagatggtgtagcctacaacacacctaggttacatggtatatcctgttcttctaggctggaaacctatatagcatgtagctatactgaatacacagctgggacacaatgcattcatatttagatatttgtgtatccaacatatctaaacatagaagaagtatagtaaaaatacaggattttaatcttatgtgatcaccattatatatgtggtccattgacgttgttatggggtgcatgactgtataatgttttttttgagatatcttttgtttaagcgaatgcagactagaatctagtacatttgctgtatttgggtttgtgacatttcacttcctctcatacttagattgcacaaatttatcattttcaaatgaaaaattaattttgagtcttttaaaagtcctacaactcatttaatattggatgttgactatcaatacaaaaatataactgaaaatatctttctagatagaagccttaatgaaaacaatgtttctgtctactgtttctgtgtgttccttcattcctttcaaaacccctttgtttcttttccttcccttccttttccccttcccctcccctcccctcccctccccttccccttccccttcccattcccattcctttccctttccccttccctttcccctcccctttcttgttctgttccccttcctcttcccccttccccttcctcttccctttcccttcctttccccttccccttccccttttctttcccttcccctttccttccccttctctttcctttcccttttccttcctccccttcccctttcccttccccttctctttcccttttcctttccttttcttccccttcactttcccattcctttcctcttcccttccctttccctccccttcccctcccccttccctttcctccccttcccctcctcgttccctttcctacccttcccctccccattctctttcctccccttccccttccctgcttctcccttccccccttctcttccctctccccttccctcccattccctcccctctcccctcctctccccctttctcctccctttcccttccccttctctttcctcttccctttccgttttccttttccttttcttttgccactgtctggctctgctttattgcccaggctggagttcagtgcatggcttactgcagtttcaactttatgggttcaagtgatcctcccatctcagcccatgaagtagcttggactacaagcatgggccaccccacccagctattttttttttaagagatggggtctcactatgttgcccaggctgatcttgaactcctgggctcaagtgatcctcccatcttggcctcccaatgtgtttggattacaggcctgagccactgcgcctgcaccagtttgacttcttgatttctgcttctcctcattcattctttctaatttacaaggccaactgtcatattagtaaatttgaaaacactattttatttctaaattacgtttttaaaagtttattttatttttttccctttatgttctgttggatttgaagaagattattttaaaccacaaaatacacttgaccagttggctgctgagaagaagttgtttatcgtttggttatttgtgagccaagcatagcttccagcattatggtaaccatccaaaagcttaaaggatgagctgagatagttctttagaatcacatgtcctctgtgacagacctgtagctctctttaattttctgcggcattagtttcaagggagatccagctgagaacagactttaaactattctgctgcaacattttgtatttcctgttagaggtctctataactataaattttacccttctattttgcatattaaaatatcttatttgaatgcagcacattttcgaactttcagtcagtatggttataatcatttctacaataggctgggctcactgagttattgataacctagtctcatctttttctatgctacattaggaatacagtctgccttcatatgctttaaatattttgtgttcaaagtgataaaatcctaaggtgttattgataaaattttggagcttggatgcgatatttttagagttcacaaaccactgcaggagtataaatcctgaataaagtcagaagccttcttgtgtgcccttaaagttacatacatcacagagggaaatgaatatgttatacctgattgtcttgacttaggggagagaaccaggaagtatcattgattaaattatatagaacaaaattttgcgtagtctatatacattgaaaaaatattttaatctcatttgatctcatttcatctttttatttatttatttatttttcttgagatggagtctcactctgtcgcccaggctggaatgcagtggtgtgatctcagctcactgcaacctctgcctcctgggttcaagcgaaactcctgcctcagcccccccagtagctgggattacaggcgcccactaccacacccggctaattttttgtatttttagtagagccagggtttcaccgtgttggccaggctggtctcgaactcctgacttcaggtgatccacccgcctcggcctcccaaagtgctgggattacaggcatcagccaccatgcctggcttcatctttttaagctagtttctatttttaattttttataattcagcttataagcctacctgttttgagttgtgaagttagatctagtcccttcaggtcctgttattaacaagaagagtatcagatggattgctgcaactggagcacctgtttgcattctaaggactttaaacatcctttcttttaattttgcatatattcctgctcctgttatgatctgggctgcctttggagaaatgtgttccagtcagtgtttctcgaaatttggtagtagaagtggtttccatctattttacctataagccaaatctgttttcttggttttaatattttcactaatgataacaaagttgtttttgaatacttgctattcctaggcattatgccatgcttggtatgttacatgttatatatcatttaattatacctataccagaagtgtaggtactgttgctgtacccattttatttttatttttatttttatttttttgagacgagtctggctgtgtcgcccaggccggagtgcagtggtgtgatcttggctcactgcaagctctgcctcccaggttcatgccattctcctgcctcagcctcccgagtagctgggactacaggtgcctgccaccacacccggctaattttttgtatttttagtagagacggggtttcaccgtgttagtcaggatggtctcgatctcctgacctcgttatccacccgcctcggcctcccaaagtgctgggattacaggtgtgagcccccgcgcccggccttgtacctattttattggtgagcaagtagagccctggagagtttaaatagctcacctaatagttcaaccagctgttaaatgttacacctaatagttcaaccagctgttaaatgataaagttgtgatataaatgtgctgaattctcttggctgggtacttgcacttttgtatttaatttttattggggcatcttgttgcaatatctgttttatttcgactttagttagattgtgtttttttggggggaaggggagagtaaggtttcaatagacgttactcaaattccctgaatcacattttctaaaattgtagtttttagccatgaatggaggacagaaatagtttccttgaatattaatatcctttttagagaacatgctttttctgctaatggggtggtagagaggaactcagttctttagaagtttgtgccatccatttctttactctaaatgcttcccatgtggcaatgtaattctccacaaaagtcattacttatgagaaacaatatgtaggataagattatgataaatgaaaataagcactttctacattaagataaaaagtatctgtggagacagtgtacctgaggaggcactttcacaattaaggggaaagctaaggtagactgtacctagggactttcacagaaattacccaattcttctacgcatccatccagtccattggagtttggattgtgggctgaaaaatggaagaaagtggtaattatcttacattgtcagactagttatatgtgatttaaatctcttcattttcaaattgtagtaatttatttaaatatatatgtatatatacattcgtttttaaattcagacgaaaaatatttagataaatataaaatatttatgatgcacatctaaataatgtataagactgtaggtattttggaattaggcaaccactataagtattttactatctctccctttctgtctagcatctgttcccttctttttgtattgtgcatagtattcttgatgcaaaatgctattgttacttataattttagttttggagcatacatatttagagtggagcatttttgaaagaaaatgagggccgggtgtggtggctcacgcctgtaatcccagcactttgggaggccgaggcgggcggatcacgaggtcaggaggttgagaccatcctggctaacacggtgaaaccccgcctctactaaaaatacaaaaaaaaaaattagctgggcatggtggtgggcgcctgtagtcccagctgtgctggaggctgaggctggaggatggcgtgaacccgggatgcggtgcttgcagtgagccgagatcacgccactgcactccagcctgggccacagagcgagactccgtctcaaaaaaaaaagaaagaaaatgaaatgttgttgcgtatttcttgccttcaaagttaagcactttctaaaatgtttttaaattgtttcagtataaatttgtttttcagagttaagcagcttttagtcaaatgttgctcctcatgtttagtgtagtgtaagaaagtgagtcaagatcttcaagatttaattgaacccgaaatatttatttatttattctttcacacactcacccttcttgttttaaggagtataggtcaaaaatggtggtcccgtgttctccattcctgcccactgctgatagtggaatgctggtggctctaggggaattcaggggccatgttggcccttatgaaatactgtgcaggaaagcaagtggaggctgtggttcatgcggctttcctttaggctctgtccttcagttcctcagagtctaagagtggacaacatttttgtaattttttataaacgttaaacttccctcatctatttcctcctcacctctttctgcatgttttcccaggataaagaagataatctaagttatacctggaaagagattttctcttgttttgagagaggatctctctctgttgcccagactggattgcagtggtccagctgttgctcactacagtctcaagctcctggaattaatcagatctttgttttgtaaaataatttgaggctgggcacagtggctcacacctgtaatctcagcactttgggaggccaagatgggaggatttctcgaggccaggagcttgagaccagcctgagcaacatagtaagactcagtctctacaaaaaattaaaaaattagccatgtgtggtgatgtgtgcctatagtctcagctattcggaaggctgaggtgggaggatcacttgagctggggaggttgaggcttcagtgagctatgattgtgcttctgcactccagcctgggtgacagagtgagaccctgtctccccaaaaaataaataaaaaattaaaacaaaattaaaaaattattttaagaatgaaatgagacaattttaaagccaacattttacgtatgattattcgtaacactgtatagtatttcttagtgaaccaaccatctctatgaaaatataatttgtgatcaaatatatcatcattttgaattcaagaactaccttcccatgtgatgggatgcttgtgtagcagtgactagatatcagaaatttttgtcattagccacctaaactatggttccatgttagattaagaatgagaagttggaaattttattactcaggattgagtagaggctaggctggtggtgcatacctataattccatactttgggaggcttaggcaggaggatcttttgaacccaggagtttaagaccagcctcggcaatatagtgagactttgtctctccaaaaagttaaaaaattagctgagtgtgttggcttgcacccgtagtcttaggtacttgggagtctgagatgggaggatcgcttgagcccgggaggtggaggttgcagtgagccaagattgtgccattgctctccaacctggatgacagagtgagaccctgtctcaaaaaaagaaaaaggaaattgagtgagtagaatttgggcattgaggtgggtaggtgtaaccatgagaatgggttgtcatcctcatctccacaatttatttgttatcacttctccagatccctgtttcttctttcagtcagtaagaggttaacctagctgttgtctagcttcttccttccagctttaaaatgctgtatccaaaatttttcatggcttccttctctgtcaaagtggattaggaacagctgagaaaattggttcaaacgagcatcctggatgtggttgagttttgctggtctttctcttctccttggattccctggttggctctctggacagatccagtggcttcagagaaatccgcgcccgttttagtttgatcagacctgcatctccaggagagatttttgaccaatcctttttcatattggatccctttatgttcatagcctgatacagatccatactcctgtgattatttttcttgtttgataagaccgttaacaagatactggccagttacaggttatgacttaaaactaaaatgtcatgcttctgattttgtcagtgtatcaacttgaagggtttgctgccatgacaggaattgtatttggaaacttagttgtaattttcaaattctttctaatatagaaattcttctatattagaattccactgtgaaaattttttggcatattcagaattcttgagttcctcaccaaattaaatgaattttattatctagaagatactgagtatgtatcagaatgactagaaaagatattatcaaatgtgaagaatgatatagttcatttttcaggtcagaatgagttttaagaactatggataatacctttaacatttcaaaggaaaaatcctagtaaaaatttgatatatatgttaggatattttattttgtatattgttaatttgttggatagttaatttgcttggaaaaattattttcaaatttttttacttactcctgttcaaaactttaactcagttgaaaaagaaaattggccaggcacggtggctcacgcctgtaatcctagcactttgggaggccgaggtgagcggatcgcctgaggtcaggagttcaagaccagtctgccgaacatggtgaaaccctgtctctactaaaaatacaaaaaattagccaggcatgatggtgggtgcctgtaatcccagctactcgggaggctgaggcaggagaatcgtttgaaccagggagacggaggttgtggtgagccgagattgagccactgcactccagcctgggccacaagagcaaaacttcgtctcagaaaaaaaagaaaattgacatttaaaaatgaaatattacttaagtaatttgagctaaagaggtgctgcaatacgtcttttggcattcaaaatctctggattctgaccagtgtttctggttgcagactccaccatagtttagcaaactattaattatcactaatgatcccgatgtggttgttttgacaaaaatgtatggatgtttgagtttcctctttgtcttgccatagttctgttataaaaactttataaacacatactctttcatttgtcttttccatacctctcattaatagttattaagaatgtgggggaaacctgttagcaaaaaggaaaagtaagatgtatacatgtaccagtgctgattatgtgctggatactggcttaggaattacagataatataggaacagattacttggcctcagttctacaacattaggcattacacataggaagttggtttgcatggatttcaaatattgctttttagttggttcattatacttaggaatagacatgcacctagggtaaatgataatgaatactgtgtttggaataaaattctgggtttccttatttaaaaaaaagtcttaataggcatttagtttattattccaataggaactgccaaaattttctgccttcatttacaagttggtgattaagcctgcgttttgtgtgtgtgagtcattttatttcacccttatctgtctcttttttctgtttttatttattttttagaagatgaataaataaattgttgccgaggctccagcctcggcaacagagcgagactgtctcaaaaaaaatcattctaagccatcattattaattttacttcagtctcctaatttcagattagatatcctgaaaatagttccctttgttttttgtgtatcatttcctggagaaataattaagcagaacattgaattctcttttaccataattgcagagctgaaaaatgtgggaaatgtaaaatcttaacatcacacgggaatatttgaaaccatatgatgcatagaggttctgaatgaaatgtatatgcattgagtattttgtatttcaaaatatgctatgatttctcataattcttaaaaaaaatgagatttttgcactgaaacgaggtggaaacatagttgggtttcctgtgccaacacagaaatgtttatgacttctataatgcttatgaaaccccagttctgacttctgcaacagagggatatagtcttgccaagaaatctgaccatcagctaaatagctgtttctgggagataaagcttggagttgcagcttagtatgccgggaatgagcctctatctcaaggcattgggtgggctctatatagttttcctgaattgtaataagcttggggagggctaaggtgggagaagacacttactttccttaccctgaaagagattttctccatagccaggataccgctaccagggagcagcaaattaatatgcatttcccagccggagtggctttttgacacctgatgctgtggcagtacatttagatgataaggaagatccctgatcacagcaggaacatctgtttttccctggcaagaaggaaaatttcccacctcgcacaaagctgagcagctatttggggcagcctcataagtggaggattaaagttataatttaaaaacgggagagtaatttcttatggcatttttttttgtataatcttttaaataaagtcataactctaacaaattaatttatgccattagtaagttttataatcattagaattatgtatatttgatttaaaatttttgatttatagttataatttgattcataagtgagcatatatagtcttgaatagattggttacgagtgccatattttaacaattatttatgctaaagcaaatattttcaaattgaaaatagagtgcatgatgtatatttcagtggacagtggtatctagtataaattgtgttgtagaaaatatttaatacattgtatgctgcgatgtttatggatatctttccatcataaatacagatacacagctttacaggcctacagtccttgtatgcacttgatacacattgtatgcagtagacggtgaactagatttgtggccagacttcaggactgggaggaagaaacatgactgaaacgctagtaggacctgcatgatgctgtcaaaaatataacaaatatgttgataggaattaataatgtattttaaaaattcttcaactgattgataataattcaagattgctgtaaataactgcacttttcatacattatacataagtcaatatatggattcatcattgattttacatgaattaggaaaattcctttgttatgagagtgaacgttagttttagttttattatccatgaactcaaagttgattccacaaatataaaattgtaaaattcttcaagtgcagtggaaaagtgcagaccttgccatcttcagccattctttctcttagtctgattattgtatgttgctgtgctgcaggtactgcatgtcataattgacttacatggagaaacagtgtactgttttttctatgcatttggaaataatcacatttgccacagacatcatatgctgtaggtgtgacaggaagttgaaataggcatataacagtggtatacatcttttagtataaatctaaaaatacagtgattacatttcactgaaaatacattttactaaagtttatcttaatgcctctttgaagcattccctaaacaatttttaaaacaacttatcaaaatgttcttttaaaattccaggattttgaaaccatgtgaaatagggaacataaaaaatattcatgaaaaagtcatccacattggtgtaagccactgtgctgagtgcttgggtttaaaggtgaatgatgatctgcccaggcttccctgtaagattagaaatagcaatttttaaaattagctaaattataagttagaaccatagttaaagtaaaattagaacagagtggtaacaaaaagcatggcatgattagttctattgagaatcagggaatgcttcttagaaaatagcgtttgaactgggctttgaagaatgttcagtatttctatagaagaaatgatgttggaagtacaggtctcaaaaaaagcaagaatgaaggtgaagaagtttgtgtggtacagtaagcaccattgtctgaaattccctctggtctacctatagtgtttgctggaggtttgatgtgatccaacatatgttttaggaaactcctgtgccagaaagtggtgcagaacattgttagagaggatatggccagagcctgtgtccagttagaaggccactgttaaaatttcaggtaagagacaagttgatcctgaactaggtttatggccgaggaccaaaatcagcaaaaatgttgtatcaataagacttagaagctgtggagatcaaagagggaggaaagagagtaaagctaattctaaatgttttagggaatggtgcctgagtcaaaatagggagctcagtttcgaggtatctttgggacctcttgttggaaactgagatcatgaattcaggaaacagtttcgttttcgtgacttgtgcttaaaagttgtcagggtaggacgtggtgaaattgtgcactttttgagcttgtccagagagataataatcagcagtccatagcgccaacaagaccatttacgggaagaggaaaaatggcatagattcaggaaggagcagaggggtgggtaccagtagcatactggactccagacaccaaaaggtgagagttgtgtggagcctgagctcttcatttcaaaagtagatctttttcttttcaagtgatattttgtcactatgcaaatatccagttatctatcaactcttaacataatagttttagtatgattatctttgcctgaattatttcattaggagttgaaaatggtcatatttctaattctgttattagttctatttccattatttggcattcttctgaaaagacaggtttcccctcatgaactggtactgttgatttctctgaaatacagttcctactgaaaagagagggtagatttttaaaaatacttttgggttaattattcattctctaagtaagcagttggtgtaataatcacctcaaatggtgggaaatgagtatgaaagcctggtccctagtcaatgatagcctcaatttttatttttgacataaaagttatacttgcatttcagtgtactttaattcctccttctctttgtcgacacataaggttctgtcactaataaataaagttctgtcattaacaagtctaccctttatgacttatctgaatttcttattagtataagaaagtcttatcagaataagcttatcaatgtatctatggactatcatatgaaacggtatttcctttccttttttctgaagcttaagttttaaggagagactcttagtatcttgagatacggtgaaccttagtttctagtttgcttccttagttagtttttgtccatgtcttctccttaccatttctattaaaaaaaaaaaaaaaacttgctgctaaagtttcatcttgctactgagtttttaaagattttgtttcttgcaggttaattcttaaagtttatgaagtttcatgtcaaagtttatgttggtaaatgtttatcaatttccttttgtttgaacatatgtcccaatatttacataaacccaatactatcaattcatttttaagttttattccctgatggaactcatgaaggaagagcaaatagtatcctgatctataactaagttttatacattgcaaacctattatattgcacttttttgtttctgtgtttgtattgggtgttcatatagtttagcacatgaagagtaagtatcaatcacacatgtaatacttatagccagattactcttaacagtgttactaaggataatatgccagtacttcttctaacttggtgtactgagttaagtggatccaactgaaggtaatattttactttgttcttataggagatgatttagatttcgtctttgaactaaaaagtttgactcccctagtttatcctagctttctcatttcttttcagaacattgaaatgaggttttacagctcataagccaaaggaagttattataattttttatctgaaagaaatatcacgtagcatttggttgttctggggagtattaaaaacttagttgataaatatttatgtaaagacatcgcttgttatatccatgtcacagtgaacaattacgtatctgttatgtaacaaataatagtgataggccagttttttcccctgatgtttgagttaatgctgactgctatcttgtgaagtaggtaatagaaacagcctgaataatctaaatctcttatccaaaaatcacaaaaccataaggctttgaagaaagggcaaatttattaatcttccttatttttagcatttctgatgaattaagatggtacctcataatttaattatgagactggaaagaagggaaaatgccacagttgagagagagtgaaagtcttgtatagaagtacttttcactttttggtgtacgtacttggtttaggtgattgatttgggtaggagtgcaaagtgtagtgttttgtctgttgtgtgccgtgtgtgtgccacccttcctgctgtaattattagacttgcctgtcctcggcacatggttataattccgaggtctaatctgggtggaatgtcctcaatcagctattttgtataggattggaaagatgttttaaatatgtagaatcatttttctgctacttttgaaaaaccaggtgcattactgatttgcaaggtctggttttttacaagacacctttttgtttctttttgaatagaaagatgaaaactacagaagcctcccgcgggatactagtaactggtctaaccaatttcagagagacaatgctcgctcgtctctgagtgccagtcacccaatggtgggcaagtggctggagaaacaagaacaggtaacatgacaaatccttatatgtgcgtcattgctgtaacatcctgtcccataccccaaagatgtttctcccatctcaatcactggtgatgattaaaagttaattattctaacaaactttagttaagtaccaatctctatgtcagagtttatctaacataaatgcaggatatttctggctggtctctgatcacagatttattgtgagcagttatgaatatttgcagtacattctgaaggttcagggctttagagtttgtaatgctacagaggcacagatgtttggcagtgaatcatgctgttagtgagtagactttcaagactcttctcttctttaataggcagtaagtccaaggatctgaagacgcaaattaaaactttctgttgtacctaacttcactgtatgagagaaatatatcctatggtgttgttttagaatttagattacggtattttgtcatgtttgggcacttatcccttcataaatttcaaggacctattttaggtttatcagtctttagagttatctgtttcactgtgcagtgcagccacctacaattcgtgaaatcagaattgtttaccactcagaaataattgttttctgccttgggaagaatgactatttacaaagttgttgcatcacttagcaaagtcctcctttcatatggaagactcagaatgtatctgatgagttacttttttttttccactttttttttatactttaagttttagggtacatgtgcacaatgtgcagatttgttacatatgtatacatgtgccatgttggtgtgctgcacccattaactcgtcatttagcgttaggtatatctcctaatgctttccctcccccctccccccacctccaatgagttaattatttcagtgttttttttttaatgcttcagttgtttttattgactcacaatgggttttttgtagtagggaatcccagtgttttataattttaattgtgctttcttccagctttattgaagtataattgacagataaaaatagtatatatttaaagggtacagtatgaggtttttatatatgtatatattaatacaatgattaccacaatcaagataatttatctgccgggtgcggtggcccactcctgtaatcccagcactttgggaggctgaggtgggtggatcacgaggtcaggagatcgagaccatcctggctaacatggtgaaaccctgtctcaactaaaaatacaaaaaatagccgggcgtggtggcgggcacctgtagttccagctactggggaggctgaggcaggagaatggcgtgaacccgggaggcagagcttgcagtgagccgagatcacgccactgcactctagcctgggcgacagagtgagactctctctcaaaaaaaaaaaaaaaaaagataatttatccatcacattacatagatataattttgtgtgtatgtgtggtgaaaacacttgagatctattctgttggcaaattttttaaaatttaatttaatttaatttttttgagataaggtcttgctctgtcacccaggctggagtgcagtggtgcaaccatagctcactgcagcctcgaacttctaggctcaagtgttctcttacctcatcctccctggtagctaggactatacatgtacaccaccatgcccagctaattaaaaaaaaatgttttattttgtggagacggtctccctttgctatccaggctagtcttgaactcctggcctcaagcaatcctactgtcttggcctcccaaagtgtcatggttataggcatgagccactgtgcctagcttcttagcaaatttcaagtataaaatatgtttattagactcacctaatgctatacgttaggtctccagagttcattcatcttacaattgaaagtttttaccctatggccaatatttttcctttttccacacccaactccctgtggtaactgccatcgtactctgttagcatgagttcatttttttttttttccaagattccacttataagtaaaatcgtacagattttgtctttctgtgtttggcttatttcttttagcataatgccctttaggttcatccatgttgtcacaaatgtcagaatgtccttttttattaaaggctgaataatattccattttatacatttatgtgtacacacacacacacacacacacacacacacgcagtgtatatcacattttctttatccattcatcggttgcaggtcacttaggttgtttccatatcttggctattgtgaatttatgcttctgtgtacatggaattgcaaatatgtctttgatatagtgattttatttatcatggatatatatgcagaagcagaattgctggatcatatggtagttctatttttttaagtttttgaggagacttcttactgtttcatagaggctgtcctaatttacattaccaccagcagtataccagggtttccttctcttcgcatccttgttatcactttcattttgacttttttttctttctttcttttgagacagagtcttgctgtgtcgctcaagctggagtgcagtggtgcgatctcggttcaccacaacctctgcctcctgggttcaagcaattcccctgcctcagcctcctgggtagctgggattacaggtgcccaccaccacgcccagctaatttttttttgtatttttagtagagacggggtttcatcatgttggtcaaggtggtcttgatctattgacctcatgatctgcccgcctcggcctttcaaagtgctgggattgcaggtgtgagccacagcaactggccctttttttttttttttttttttttttttttttttttttttgagacgcagtcttgctctgttgcccaggctagagtgcagtggcacaatctcagcttactgcagcttctacctcctgggttcaagcagttctgctgtctcagtctccaaagtaactgggattacaggcacacaccaccatgcccagttaattttttgtgtttttagtacagatggggtttcaccatgttggccagggtggcctcaaactgctgacctcaagtgatacacctgcctcagcctcccaaagtgctgatctcaggcgtgagccactctacccggctgtattttgatgttttgataacagccatcctaccagtgtgaggtgatgtcctaccttgcttttgatttacatttccctggtgatgagtgatgctgatcatttttcagtgcttttaataaaaagccacgtgtttgtttagttggtcacttattttctttaaaaagtttatatggatagaaagcaaggtgggtactcagagagggtttagttgctttattaatttttaaaattattaatgattttgttgactaaatgctggaataaattgtttttcaatttagattaatgacagctgtagaaagaaatcataaatgttttacatatttcatctcagcctatgttttatggtataaagatcctaaagtaatttcatggatgtagggtattaaaatatgaaacagcaaaaagggacagcttgccttgcacaccgtgatggcacaggaaatgtcctaattttgtcatatattaagtgttagcatacaaacattgtgtgatggaaataattttaaataataaaacagccatggcagttctatgaaggaaacataattttctcaacataattcggatttttaaactaattgatattagtatcttattattactttgaaataaatgtttttaagatttagatagtttctcatggacccagaagtcagactgactggttactagctgtttaccatatatgagatttgggcacattactctacttgtccatacatcagtttactcatccagcaaatagggataattgtagaccttgtctcaggggttgccgtgtcaagtgatacaatacccgccaaaggcttagaatcagggctggtacctagaaatactcaacgtattaatataataggacaggtaacagacaacctggaatctagaatgaggaaatgtttggcatatatgtagcaggaagtctggagctagggaatatgtgggagttaactctgtagcttagcaacctcactcacattttttcagggagccttcctgaaggccaccttagctctgtgctctagcttgtccttttctttcagagccacatccttgcacagaggaaggggaacagggcctttgtcttctttttgtggctctttgtaaaagcaaatacatttttcctaataacctcctgacagatccctgatcatgtttgttggctggaattgccctactcttctgcccatatcaaaatcaaagggagtaaaagcaccagtataggttttgatggatagagcttgacccctggaactggggctgcggtgggagctcccttctttaccttccctgaaacacagtttcccatcacttcacacagtcagatctgttaagcaagggatatgtgggcagggatggggagtgacgaccagaagttggttgagtaagctaaataggactttttttttttttaaatactgcaaaattggtagaaaaagattggtagcccagagcttctaaaatatgatacagcttaattatatcataaagatataacttttatgattctactgtcattgtagacctgtttttaaggaagtagtatattctttgtaattttgttataaaatagtttctttttaagcaaaagggatggcattgagaagccacacacaccaaagaccgagctttgatttgcttctgttgaagttatttgagttagttgtctatgtggactgagaaggtacctaagtctaaaaacatcttctttggcataagtgtaaaaaaatgatgttccattcctgaaatttgatttgagtgaaactgtatactagaagagtagaagccactgatgttttcacatccagcagaataattgattaaactaaaatctgttgaagaggacaagaaccacagaaacaaaacaaaactccctctcaaattttttcagaagtaagcactattgtttgtgcagaagaggaatcttaggttatgctttatacactagaaatctattccaattattcccatttaattatggatttattctgttaaccattcccggaaagtcatctgactttaatgacctgatgtctcttctgaggctttctttttctctttagtttttgctattaaacatataataaagaggattgcatcatgtacatgaaaaaatattttgtatgcttaaaaaaaaaaatcctctgcctttccaatttgggaacaccagggtagaactgatggccatcttcctttagtcgtgtggtctggagtgaggtcagcagagttctagattttatgtgcctccagtggttttgtttttgctctgttttctacttaatgcttatctctcattatctgtttctgaaggcagttatgaccttatcagcttttccagtgggaataagcagaaggaatggaaaggcaaaagagtgctttaaagtgctaagctagctggcccctctagaagtctggggtgtcttattctttgggtggtattggtcctacttacggggatagtgaatcttctttctataagaatattggttagttttacttcaataagaaaagataggttgtatgtcttattagaagtctgtagcagcaagcacaatatgatttccaaaaagagtagccggggttttcagtgactaatcaccttgttcagaatagcccatagctgaatcctacatcagagtcatctcacaagttatgcttctgaaattttgactctgacactcaagaaacaaacgaacaaaaaacaacagcacttttagttttgatgtttgacagtgttttaagaagttcaaattcctttttaatggtaactgtttccctgactcagcatagaatatagtttgatattggcagataatagatcataagctgactttgttcttatattcccacactttattgcaactaataaattccacagaagaggcagcagggactttgtgatacatgactggaagaatttaggaccagaaggtagagggaccttaaggaaaacataagctaattgggagcctgccattttcacaaccttctcttgttgaataggcctgagcccaattagcagaaacagcagagaggcacaaggcacattccagccactgcttaagctctgttataggggaatgactgccctgacctttagagcaaaatccatgttttttccatgttttagggctctctccatcaagaaaaacatcttttaattggagattatacaaacaggcaaactggagggaaaactgacttaaatgtttgttgatgaagacaaaatgccgatgtctacgtcattttcatacctttggcagctacaaaagaatcccaccatccagtgtcaagtctcaaagtctcagaggccagagttttgggagcaatgatgataccttttttcctttttattttatatacctttgtcactttctgcagctgtgatgctttttctttatacttttcagaatatttatgcattataaacaatattcacatgatacatgttgtggtttggctgtgtccccacccaaatctcatcttgaattgtaactcccacaatttccacgtattgtgggagggtcctggtgggaggtaattgaatcatgggggcaggcaggtctttcccatgctgttctcatgatagtaagtctcatgaactctgatgattttaaaaatgggaatttccctgctcgagctctttctttgcctgccgccatccatgtaagatgtgactttctcctccctgccttccacaatgattgtgaggcctccctagccgcatggaactgtaacatgtccattaaacctcttccttttgtaaattgcccagtctcgggtatgtatttatcagcagcatgagaacggactaatacaatacacaatatataagttatattcaaaaattatttgagaaggtaagtttctatgagtttaattttttgttttcattataatttacagccaaattcttgaagattgagggcaaaagtaaatttaaaaactagtgaagaaacatttttcagcatatccaggttttatggaggcagttttttaaaaatgtgtttttctccaggctagtcaatataattgtggacgcaagttttgcctaggttttagcttgttcttataaaatggtgggtgtctgggatgatcaacctgtggttcctgtgtccacacgacttaccagagttgttttttttccactgatctgcctacatagaagaaaatccccttccttgcccaagtgcttactagccttttctaagtgaaaaaaaaaaatctcatttccctgagatctagaactatccagatgacataaagaagatgttttctggagtatgaaatgataatgttttcttatcttttttctgttttaatctttaagaggctgggttcttgctctgttgcccagactggggtgcagtggtgcagtcatagctcacttcagcttcaaacttctgtgctcaagcaatcgtcctgctttagccttctgagcagctgggactactgatgcacaccatcactcctggctaattaaaaaaatttttttgtacaggtggggtcccgctatgtttcccagactggtctcaaactcctggcttcaagtgattctcctgctttagcctcccgaagtactgggattacaggtgtgagccatgatgcctgtattttctttctttctttttttttaacgaatgtgaggccttttaaatgttgcccaggttggcctcgaatgcgtagcctcgcctccttgtgcgccaggacaaccggcctgagccaccggggctcccctcagtgcctatattttcttaattacaataggaggtggtttattcagcaatctgattacaacaacttcagatcggtcagggaaatgactgaggggtcacagcattaaaccgtggaagagctatagaaagtctgatataggaatagatagggcttcatggtatctgccatcattggtgagacttaaggatagattctgatgctgccagatagtagttaagatgtgggttttttgggtttgttaattctgtagcgtgaagtcaatgaggatccaaatgactgttcatattatttggttaaaaataaactaagccctttgcctccaaattctaaaagttctgtggaaaggaagggatttattattatttaccagttggcaaaccttcataaaatttgtagagaagcaaaatagtcgtgtttatctctagcaacaccaaatgtagaaactaaaaacatcaagattgttttaaaattaaacttacttttcattataaaataccagaacttctattttataagataaatctgttatgtccccaataacacccaaaataaaaccaaaacaaccttttaagagacttgttacctggatatattaacgccagtagcagattattttgttgtgctttgataatagaatccctggtattctaacacgtgttaaaattattttttaaaaaaacaatgatcaaaacaccctatatgtatgggacacattattttccatgatccctacatattttctgcttttattatccaagaattctggactagaaaccacagtggaagcacaggaccggagtgtggggctctggtggacgttcttcttagaaggacacacacattttctggggagcttccagtcatgtgcagggttacttttaggagtaccagatggcattctacttttccatatatttaacaacaaaagacatagtgaatctgggaagcatgtttcagggttggaaacctgtccctccaatgagtgtgtcctgtttctgacccctaagactggttatatagaaataaagaaagataaactatgcaaacttcattttcattgtatacaaaatggggaaaatcatacccatttggcagatgttaactttgtgggcaaagctgaagtgacacagcacacattccagtgcagacccagtttcttgtatattaaagacactcataagatgttttctttcatatctttttaggtaacattaggtttattggttatacctcaacaactccctcaagtattgggtatctcgttttcttaaattttgtttttctccttgcatattggaagtaccattaggtatgctggggtggtttattttcatccctggtgtatttctaatgcccccatcgtcatttcgcaatttgatttttgcttccgtggcatcttctcagaattagaataaaatttaaccttttaaaatcatctctggttcttttctgaagaacataatctgacacaaaaatgacatcagtgttaatctctatgtctgcttccattccttatattctcttttgtttttggcgggcgtgtgtagttttaataagattaaatgtaaggataccattaagaatgctaagtatcttcatgagagcttctgcttgaccacttgctaggcatctgggtcccttcgtgatatgaatggagtttggagggcacagcatcactcatttgcttttggacctggggtgtgcagttgaatgggggtactcatcaatttctcctttaaaacaaattttacaactgtctttatttattgcttctttggcctatggagctaaaagcctgcaagcagcggggaagtaagttagaaattttactgagtgaaaaatctttggtggtgtgtggattaaccttcaggggaagtctgttaggagctgatggttttcttacctgtgaatactactgctagaactagacatttagagcttgcactacggagaaagatacattttcatttttaactttgaccttcaggtgcctttgcatattttcattgcaggcagtcttaaagatttttgttgtgagctgtgtgattaaatacgacaatggaaggaatacatgctttatactataactctctttattcccacccatctgtacgtcatttgcttttgaaattttgttctttatttctacgttccatctatgttccatgagctgtgcaactgctattctttaaaaaatactggttatgaaattgcattaacattttcatcctacaatgtgtttttttcactgcctgtgtcctacaagcctgcttttagaaattgaatcacttttataagtcatttttaattttgaaattttatgatctagctatttaatctatttctatccaggactttcccagttaccttcaacatggtcttgaaatggccctaaaaaattcccgtcttcagtgttcaaacattttgcccggtggttgtatgttttcttcccaccgctgaggcctgggtatatgtgccctatagtatttttgtgacttctgtagatatatgagccatgtttttcctttatttttgaatttttttttcctgtgctctaatggcggtaggagattgtggattatctttttaaatagctgaacaaattataaagaaattaaagtacggtattgcggtagggttggcgtaggcttttgggtctcatttcatgtgtcagtattattactgtcctttatagtaggcacgtaatacttttgacatgttattatttttagtaatctcagcactttgggaggctgaggcaggtggattacttgaggtcaggcgtttgagaccagccttgccaacatgatgaaaccctgtctctactaaaaataaaaaaattagctgggtgtggtggcacacgcagtaatcccaactactcagatggctgaggcaggataatcatttgaacgtgggaggcagaggttgcagtaagccaagattgcaccactgcactccagcctgggcaacagagtgaaactctctcaagaaaagaaaaaaaaattaaaaaatgtttttatttttaatacataacttcacaaggttggaagactgagcttttttttttttctgcaagttactgtcatttccaaattgtaagatggaattgcagtcttgatatgtgttggaattaagtttaaccctttgagaagcaccacctcttttcctacctttagtaagccctttaattctccgaagtaattcattaactcttctgacctagctttttattccattgaaaaaatgaaagcctggttcccaccaccatttttacagccctgcccttcctcgcatgcagaagcttccctgacctctcaaacaccaaagttttcactctcatcctgtctcccaacccttcccagtattaggacgttgcttttgtattaatctcctgtctacggagtcatgcacataatctcctgtcttcacagtcgtgaatgtctcttgtttttctctctctcttctagaactttcctatcagcagatagactcaaccaaccccagtcctccctggcaaacccctgtctcattgtggcaccagcctggcttgcactccctcacagttcacacacttggttcccacttagctttcatgcagtcacctgtcttcccctcagggactttcctccatccccccatttgatggcgggtgatatccctgcagccttctgttattgtctctttgctcaccatccttttctctgtgatatttatgaatctaaatttgtcttttgtttcttttttattttttatctttctgtctgttttgctgtcctaaaatggcccaggcattgtcttgtttactatagctcctagtgaacccttatatacttttgggtaaatagtctttcaataaattgaaaggaaaaagttcataatgtccctactttttctgatatcatgtattatgggtggatctttgttgggtgaactatattgactcttttataatgccatataatgtgatatggtgattttcattaattatgggctataaactgtagattataggtaaataaatgaaaacttgatgaagacatgtacatttgtaaacctcataaatagttgtactattttgatgacattattgcttataacttagcatctgcatatgacaaaaagaaaaaaatgattataaactaaaggaccaagaaatggagggaaatgtaagttctctcaaagtaatgcaatgttcctatttttttaaatcttgatatgatggagagcacagcctttcttgtgcataagtttaatcgtttgtgaactttcttcaagaatgtcttgtagttgaacatggattcagtgttagaagataagcccgctcagtctgtccccgctggcctgtatccagtggtgtctgctgtatcaccgctgatcacactagccgtgggaaagccacctggctctccagaggctttgtagagggagtgagggggcagagggtaagagctgctatgagctacttatgtgagatttttgtgggacaaaaggaaaagccaaaaaagtgttcttataggcccaagatagttgtcaactctattagctctaaaagtatttaattaaatatttaagatgtttaattatcaggaaatattaaataactcttcatgtttatataactaaagtgacataagttttctgttaaattggaaaaacaatatttgaacaaaccatttgattatattgaataatttataagcaattgatttgaacataacatagttaaatattccctccataaaatattacgtattttacttgtttgcgagctgattttagctgtttaaaatttttttctttagagagtccaggggtttttcatttttattcaaatgaaaataaattatactgttaatttaagaccccaaactggcaaattttttttcttggagatgaatttttttcttattctaggaacaatggatgtttgcttacatgttcaatatataaaacatggatgttacaaattctgatctaccattaatatgtaatacctagtatatagcttttggggagtattttcctcagttctctgagtaaagctttttttgtacatggatatttggtagaaattgacatttgatatgagaattattttgagttttggaaatcattttcaaatacagaggaaatattcttcattatggtattgcataaaaagtttcttagtcactggagtgtatcctggtttgaggataccccatacaggctatagaggattttttgtttttttgagttgatgatgataggtgtcccaattccttattatcattagggttcattagacttctgtatgagacacaggattctaatcttccctgttcccatgggatacagtataactcttcagactatagggggattaatttgataacattctttaatttttaaaatatttatttgaattttgcaaaggtgatacattcatagttctaaaatcaaacgttatacatggagatgcaaaatagtagtctccctcccccaactctctattagctagctctcctccccgtattcagccacagttatttgtttcttgtggctcctttcaaatggtaccatgcttttatgagcaaatacggaaacatattctcttttcacctttttatataaatactactacagtatcctgtgctttgattttttttttcttaatatagcttggcaatccttatagactgacacataaaaggtgtccatttttgaaacactttgataattttcctttgtatagctgggccagtgtttattgatgggcattaaggttatttactatcctttgctgttgcataaatatactgcagtaaataacctgttatagataagtcattttgtattgagtttctcacagaagtatgcctaaaaatgaaattgtatgtttacacattgtacaggaatattacatacatttgtaactttgatagatgttgtcaacctgacctcagtagacatcgtaccatgttgcactccactagcaatgcccaagagaccctgttcactctatcacctcacattgtgacatgatgttgtatgcagtctattaaactgacttgatcagttatacctttaaaatatctccctttacacattctctaaagcagaaggctgttgatggagttggccaacatacaggctgcaagtgggcttcctatactgtttaggagcacagaccattcaaaaccttcccctttcctccaacaaataaacaacagttaaggaaaaggacgtcttggggtgagagttgggttcttcttgctctgttagagcattgagttcaattctttagcatttgctcagatgtcagtcactctgaaatgcacataaatcaaatgagactttctgaaagttcttacctttggcataacttgtgtattcttttcatattctaaatttcgtatttgattcatatttttatattttcaactggaattgagttattacccctgagcattcctatctcctatttgatagttgttgtttttgcatactttgccagaatgaaaatgagtagaatgacggggacagaaaaaggacaagattttctttttttaagatgggtagttcactaagtgcttcttgaaaagtaagagttttatgctgtgttctcaacagtaacttttgcccataaattctgtctgaacagaatcaatagtgttttcttcccttagtatatcccaaagcggggtgctttgtaatttacttctgtgttaacttttttcctgttatgtcttagactgtatgttatatgatagtatagaagccacctatgtgaaatatttaaacttttgtgaatgaatgtggtcttcttgccaaacgtaaacatactatgtttttctcgattgctcgggttcactgaagaaagcacaccttcttaagatacaagatttctgttgatgggattggtctatttgggggcttagtcaacagatattagtgtctcatttgtaacctttctcataccatgaaaggttgttggcaatttgtattctcattatcttactacctatttggatctggcagtctttctctttctttcattgttccatcatttattggcttaaatgagtatttggaagtcctggctggtaagaattctgtgtctttggatatattgattcgttgactctaggaagcaactgattttagattgttcttgatgtttccaaacttttccctttctgatgtttaagaagttgagatgatgaagtgttgccatctgcaattacaacaaaagtaccagagatagccacagtgacttcctttttttttcctgttatttgtaatatcaaaatgtaaaccagaaacagctatgcacacatatacacaggataaataagtattaaattaatattagatatcaaatgtggaatttctgaaattgcatgtaagtgtttagaatgacagaatgtttaaatgtcttttaccgttccctgatacctttatttattttggttttctatctcttatatgtcaacttgtcctaattaattaaattaattttatgcttgatcaaaataaatacagaatttgtgcagctcatagcaaagcctcgtgtgaatgtgaatatgtgctggtgtgtgaatgtgatagttatgatgttattttgaggctattttcactaaggaaaagacagtccaggatcctgatattgcaccttttatcagccattgatatttagagtgttctttactttttcctcctcttttctgtatgcctctaatcttggcaattgtatttttaaattcattcatccctctgcatcttcattactacttccaaagtccaagctgtcaacagctctcacctgggtcactacacaacactgcagccctcctccctgtttacatctctttgtccactgtggctagactgatgtgtggtcaggagcactgcttgacacactctggggctctgaccatacccaggaacaccgtgggtgaagtggttaacagctgcttgaagttgcagcaacctggattggaattgcacagcatgtcttatgctgaccaagctgctgaactttctaagtgtcagagcaagcttcataatctattgtgatatatttcagaggattgtgaggatgagataagatgagtcatggaaagctcttaagacagtagctaaaacacatgaaatactctaagtgtgagggctgatattggtgtttttgtcctttttgagtcttcctgatgttccttcaccatgtggatcgcagctgcttccagggtgcattcccaggttaggcagccctgctgaactcactctagtctccagatctaccctgttcttgcatctctgggtctttgaacatgctggccaactcttccctttttcctgcctaggatctgctgttctgatctcctgccacctgcctccttcagctcattattcttagccatacccgatccctgccaaaaccaatgtgaggcacacataatagtgtcttattctttcccatccttgcactttccaaatttcattttaattatgtctttctttttaaagagggcaggacccatatctgttcctctgagtttttaatttgctttgttttcgagggaggcatgactcaatgtgtggaggcattgggtctctgtcacatacgtttgcagcctagcgtaaccatgcttttattgaatacatttgttattataaagggctttctgcttgtaatttgtatatctggaaatgttcttctcttaaaacatttttacagcaaccattttgataaaaaaatcttattccatagatagtatatattttcttacattgaatgattaacttttcaagaatctcctctagattaaattggagaaagtttgaggggagggcaaggaatgttagtttgattatatcagcagaaatctgggctttttgaattactcatattttaagtcccttgggggactaattttcctgagaactttgtattataatcataaacagatccagttcagtaatactttcataaacttctggctgagactttggtattaatgtcctgaactcttagaaagagaaacatatttttgtaggttggccaagaaaaataggtcttgattcaaataaaataatgtatttgttatttttaaaaggtttttccattgagcaatctgtgaaactttttggtaatttagttgtctaatattggacatgacttaggcagtgacttggtgtattttctgtggctcaatataatgactatttgaatttttaagtttttgcttttgacttgggagtaagttatgttagattacacattattacagaacagttaactgttactcctttggttgtagattttaataaaaggtagaatcctgtgtcttagttccttaaatatatttgaaatggtaaaatatgcagagaaattttttattgaaagtaaacattttatttaaggtactttaaatgtactttaaggtacatgtgcagttttccccctgctgttagtaaatggctgaaatagcactttggatctgtggcaccctggagaagctttcctcttcactcctctgacattctgtttctaagctcattcatattatttatagaaatttcttctttttgctctacctccctgagtgctggtcatttctctggatgggtttttacatgctcttccttggtgaacttttatgttactttagttcctcttcctgttccttcagacttgtgcttacctgcaaggatgggctggtcactactgtctagatatctttttgatcactcagattcaacatgggtgaaggtaaaccatctttatgttttccctgagatgggaagtggtccctaataaaaagggcaatgtgacttgaaactgccagttctgaacctcattgtccatggatctgggccatatatagcaacctatgtgttcagaattaccttacccctgtgaaatcatgagtagttaatttctggtgtttcctacgcccagaaaattctatgattggccattcttttcttgtttcttttaattttgctctgtgtctcccaggcttcaaacttactctcttattatcttctctctaattttttatgtcttacctagtgccaggtactatatattatacctttactcctctgtgtgtgtgtgtgtgtgtgtgtgtgtgtgtgtgtgtgtatgtgcacgtgtatatctttctattttcacagcacctgttctcatttcagccatattccttttgactagacctatgtaatatttgtctccctctccatctgtttgtttttaaaatcaattctgcgttttcctatttgcttagtcttccaaattgccacttggatttcctcacctgcaagtttaaaagcatgcaaaacactccctactgtattttgatttaagttaaatcaaatttattatcttgatattctgggttctctgcattcttttttttttttttttttttttttttttttgagacagagtctcactctgtagcccaggctagagtgcagtggcgtgatctcggctcactgcaagctctgcctctcaggttcacgccattctcctgcctcagcctcccgagtagctgggactacaggtgcccgccaccacgcccagctaatttttttagtagatacggggtttcaccgtgttagccaggatggtctcgatcttctgacctaatgatccacccgcctcggcctcccaaactgctgggattacaggcatgagccaccatacccggcatttttttttttttttttttttttttttgagacagagttttgctcctgtcacccaagctggagtgcagtggtgtgatcttggctcactgcaacttctgcctcccaggttcaagcaattctgttgcctcagcctcccaagtagctgggattacaggcacacaccaccatgcctagctaattttgtatttttagaagagacagggtttcaccatgttggccagactggtcttgaactcctgacatcaggtgatcacccgccttggcctcccaaagtgctgggattacaggcgtgagccccttgcacccagcctgagctaccacacccggcacaaatttctatttaacttttttaggcatcatctcctaccatgatctcatgcatattttgtgctctggtggactgctgtgccttcctttaaaatcaattctgttccttctgacttcagatattcctacaatgctagactccccctactttctgaatcagcattgtgtcattcattgtttaattctgtctttgatcatgtgtattgatgctcacattaagatgacactctgcttgaaaatgaaggggtagcatcaggggtgttattcatgtgcagagccaagatggatctcagcatcatacttattaactgcaatctggagtaagctacttaatctgtagtttccttgagaggcctcaacctgggctaaaatggtcacttaatgaaaactgatatccaaaaaagaaagtgtgtggtagaattttgtggaaatccaaatcatttatttcagttaatgatctgtctagaaaacgccaatcagtttttatcacatgacctacatgttcctcttcatttctgtggagtaaaagatgttgcggtgctccctctgtgtcacaccctgtgaggaagtggtgtaatatgcccacaatcagatggcctagatttgactttctgaggcattcattagcctgacccctgtgatcctccatttcctcatctggataattggggaaattgcctctttcttccttatgcagttgttcagaagctttaataccatagcggacagcttatggtcttgacccagaaaaagctaaaatttctgtttcttttagttgtgtgactttggcaatattgattgtttcctattttagttttcttatttgcaaaatggtagatgatagaaccgatttcatggacttcagtaaagataatgtaaaataatatggttcaatattaatcagtgttagttattttagttaccgtatgctagttcatgcaagcctaatataaaatttatttttcttctcgctgcttatccaatcctagtgattgctacaaatttttgatagtcatattctatcattaggaagtcaacttgctgcttaaaatggaaagccttgttagaataatataagtaaattacgtacaatagtctattctattctaagatattctaggttaggatttttaaaatgtagaaaaaatttggagtgtatgatcagtattatctttatatttctcatatgtgttagatggttatgtttttcatgtagtcatacatatggttaaaatcctttgataacaaaagaaaaaataccatatagccaataattcaagaacatgccagttggcatattctcagattgtactcaaatggtaaacactttcaataaggtgtttcttaatatcttactaagaagtactagcattatggctaagctgctttttgtaaataaaacagatttttatagccaggtgcagtgactcattcctataatcttagcactttgggagaccaaatcaggaggattgcttgggcctaggagttcgagatcagcctgggcagcataatgagaatccatctctacaaaaaaaattaaaaataactgggttaggctgggtgcagtggctcacgcctgtaatcccagcactttgggaggccgaggcgggcggatcacaaggtcaggagtttgagatcaacctggccaatatagtgaaaccgtgtctctactaaaaatacaaaaaattagctgggcatgttgatgggcatctgtaatcccagctactagggaggctgaggcaggagaattgcttgaacccgggaggcggaggttgtggtgaactgagatcacatcattgcactccagcgcgggcaacagtgcaagactccgttttaaaacaaaacaaaacaaaacaaaacaaaacaaaacaaaacaaaacaaaactgagttagagtggggctgtattcttagctacccagaaggctgaggcaggattatcccttgagcccaggaagtggaggctgtagtaacctattatcatgccacttgtactccagcctgggtgacacagtgagaccctgtctcaaaaaaaggaaaaaaaaaaaaaagatttttatttacttgtggttctaatgcttctcatctaggttaagttttgcttaaattcaaagaggtgtctagacagaagtaactttgtcactaaaaccttcattcatgactatataatatatatatacaatgaaatatcatttcatttcatgaatattttatccagcatacatgggatataaaaattcattttccgagtttctgagattttattttctttttcttctcatagaaactaagtctttttcaagttctgcactgtacctacttttggctttaaaatataaaaggaattaatttgtatgatgttttcaatgtgaattcatttacaacctgaatttataagcgttctactctgactatgacttctaaaaaatttccatatgcatactgtggttttaaaaataattgtttattgtttattcttttctttactacctccagtctgagcaagagttctttctttctttggtgcaccattttgcattgctaacaaattttccttgactgattcgtacttctattttggatgtgtgtatatatttgtgtgtttgtgcaagcttacataaaatttagcgttagtgtttctgcatgatttcctttagtttataatgtaggaaaaaaatagttcttacagtctctcaccccaccagtgatttgatttagcaaaaccactggctttataatccttcctggcccttttgtcccattggcagggctctaacctctttactccagagaaaacacagctgttgtcgtcttctttctgaacagtgaagggggctacatcattttcaactgtattttgaagaattaatttgtgcactaatataaatgagttttctaaatttaaatgtttgaaataaagacaatttatataattttaggcctcttttttcttttagagatgggatctcactatgaggcccagactgggtttgagtttctgggctcaaatgatcttgctgcctcagcctcccaactagctggaactgcaggcacacaccaccacacctggcttaagacatttttagcaataaagcaatttttggtaggtatttgtgagtagatgaagagcttttagttatgttgggctctttgcattgtctcttacgactaggcttattcataagaatcctataagtcatactgctttaaaatttttattatcactagagtcaggggaattgggagagattcttcctcagttagttgttctatcttgaagattggggaaatgctggaggtttgttgatcgggagagattcttcctcagttagttgtcctattttgaagatgggggaagtgctggaggtttgttgtgggatgatgtcgttttttgggagttgctcaccttgcaagagccttggtctaccggccttctctctcaggtagcatttgcccattgccatcacatattccacttcactgtccagctcccccattcctctacatggtgatatggtgtgtttgtgtctttgtgtctgtgctatgtagttgccacttccccctaccccttcatcgcctccacatatcgggggaacctgtccccgataattcaacgtagtttcttttatattttccctaagtgtcagccagtctgagaaataaagagaaagagtacaaaagagagaaattttaaagctgggggagacatcacatgtcggcaggttccgtgatgccccctgagcggtaaagccagcaagtttttattagcaattttcaaaggggagggagtgtaggaatagggtgtgggtcacagagatcacatgctttaagggcaacaaaagatcgcaaggcaggaggtcagggcgaggtcacaaggtcagggcgaaactagaatcactaatgaacttccatgtcccgctgtgcatgcattgtcattgataaacatcttaacagggttcaagagcagagaaccggtctgactagaattcgccaggctggaatttcctaatcctagcaagcctaggggcactgcaggagactagggagtgtttcatccctacctacgtctgcataaggcagacactcccagggtggccatttgagaggccccgcctgggaatgcattcttttctcagagctgttaattattaatattccttactggggaaagaattccgcaatatttctcttacccgttttcggtaataagagaaatatgcccggcccacaggcagccagactttcaggttatctcccttgttccctgaaaatcgctgttatcctgttcttaaggtgcccagatttcatattgttcaaacacacatgctctacaatcaatttgtgcagttaacgcaatcatcacagggtcctgaggcgacatacatcctcagcttacaaagatgacaggattaagagattaaagtaaagtcaggcataggaaatcacaagagtattgattggggaagtgataaatgtccatgaaatcttcacaatttatgttcggagattgcagtaaagacaggtgtaagaaattataaaagtattaatttggggaactaataaatgtccatgaaatcttcacaatttatgttcttctgccatggcttcagctggtccctccgtttggggtccctgacttcccgtaacatccacacgcctgggattctgggattgctcttcttctacttccttttctggttgtgactcatcttttaactgtaacttattgaaggtctcctacatttttaacactgaggtacttgtgaagaaaaaggacattcatttgaacaaatatttgccactagatattagtcttaaacttaagccgatatggtactattatttagaaatattttaacaagtaaattttttgaaataatcatgtaattactcattcttaagttgcctatcttactttttaattatagaagtggattctatagcactgtaactattttggttctcttttccttatctcttttctacaaaaaaataccattctccaaaaggacattttagcgtgaagtaagccaccaagcacatgcaaaaagtggatggattctgtttactgtgttttcagttgtttaacatttatattgaaaatgctatgagtaacgaggaaactcagtttgctgaatgttcaccatgtaccaaggtttgtgctaaatatcagtgttcatgatcttgtaggtaaagcaggcattactattgccatttaaaggtaagaaaactcatccttttactaaactgtttgcatgttacctacctagtaagtgatagagatacaatttaaaaaccagttgattctggtttttaaacctattacttgtacggttgaaaatataatactatatttgccattttgtttttgctcagttaaatatttctttagtattgactctaggctttggtgttcagtattgattaaaaaaaattcaactctgtcctcagatacctgatagtttattgggtccacagaagattggaatcattgttgtgtttatgatgaagtaatataggtggatgtaaagcatctgtgaacgtttcagtgactttgacagttgaatagaaatttgggtactctgcccaaaacactaaagctgctttgggtgaataaatagtattgactttaggctttgaagcacaagtaagagttaaactagaaggggattaaaatccttggcaaaaagtcagagtttaggtgaaaatggattacagtagcatgtccccatgcccagcgccacctattttcacagggacatgcgcctgtaatcccagcactttgggaggccaaggcagcaggatcatttgagcccaggagttcaagacaagcctcagcaacctagggagacccccatctctacaaagagtaaaaaagttagccagacatagtggtgcacacctgtagtcccagctgctaggaaggctgaagtgagaggatcccttgagcccaggagttcgaggctgcagtgagctatgattgtgccacagagcgagaccctatctccaaaaaagaaaagaaaagcaaattggtggaattttcgtttgtgagtaatctgatgtgttgagagttgtttgttagtggccggggtgcatagaacttagattgggttctggttgtgaaagtatccaaatgtataacgttaagaggcaatgttggtgaaagaaggggtctagagtgtcacattgcttccaaatgaatgtttcattcattaaagtataatgaaaatggatttgagaagagagagacaaaagagagaacgcttaggagggtgagcaaaaatattctaaatgcaggctattccagtagagatggaaaaaaattggaagataggaggtggaataaaaaaaaaagtggtcttggtcatgattaagatgtaattttcatatgattgagacattaaaaatggctcacagcaatgtcagtagaatggagggacacgccccaggtttctaggaggctgtgaagaaaatgggaggtataaaatgtggaatgctaagagaaatagaggaatcttctttgttttaattttttaaatagtaaaggagatttttgcccagttgcctgctgataggagagagccattgctcatgtaataggtctttttgctcaaaatttaaagttaggccaggcatggtggctcacccctgtaatcccagcactttaggaggctgaggtgggtggatcacctgaggtcaggagtttgagaccagcctgggcaacatgacgaaaccccgtctctactaaaaatacaaaaattagtccggcgtggtggtgcgcgcctgtagtcccagcctctgctgaggctgagaaatgagaatctcttgaacccgggagacagaggttgcagtgagctgagaccatgccattgcactccagcctgggtgacagagcaagactctgtctcaaaataaataaataaataaataaaaaatgtaaagttagaatcttgattacttgaattactaagcccagtttcatcatgctgcatatttgattagttccttctggagtctttcaaagactttctggtttctacttacctaaacggttttctgttactcgaatacatcttgttgcctatttcttccaacagattattatgaatgtattaaataacattggtcttgattcttatcccaggggattctgctactaaaatctctgttcatcctaagaaactctttatgtttgtttgttagagaaaatgatgactggtgattttatttttcatcccctgcatgcattgctgtatgtaagaaaagaatggaagtgttcatcaatttttagctgctctttgacttttctattatgtttgtattatattatattaggtaagatgttaatatacaataacaacacttgcaaatatagaaatatttatgaccttaaaaataaaagggaatttaagggttaatcttcaatctgtggtgagttgctttttgctggaataatattgcttggggacttcctatgaataagtagataaaaattggaccagagtttcatgatttcttttcaattccccatgtgattataagtttgccagtttgttaatatttgaactttaataacggttctgtgagttgaaaaacaccattatgattttaaggtggtctggaaaacctaggtagttgttgcataatttgacgtaactacttgaaactctggttctcttaaaaacaattttgataatagtaataacattactagctttttttaaacatgcccaaattcagttgtgtatgtatttgtgtatatgtgaatcagtgtgctgtatttagggtaatttttggttaataacagtaattacaagaattattccttttcaaattttataaaatgttttaattgacaaaaatgtatatattgtgcacgacttgatttgaaatatatacattatggaatggctaaattgagctaattaagacatgtaatacctcacgtacttcgtttattttgtgtggtgagaacacttaaaacatgttttcttagcagttttcaagtatacagtatattgttattaactacagtgactatgttgtacagtagatctcttgaactttttcctcctaatggaaattttgtatacttttaccaacacatccccacccaccatccccctaaccccaggtaaccacaattccactctctactttgatgagttcagtgtttttagattccacaataagtgagatcatacagtatttgtctttctgtccctggcctatttcacttaacataatgtcctccactatcattcatgttgccacagtgatagatttctttctttttaaaggcagagtagtattttgttgtgtgtgtgtgtttgtgtatgtatgtatctgtgtattacacatttttcttattcagggtctattgataaacactgttgataaacaacaagataggttgattccatgtcttcgctaatgtaaatagtgctgtaataaacatgtgagtacagctatctcttcaacatactgattgcattttctttggatacatgcccagtggtgggattgctaggtcatataatagcactatttttaactttttgaagaacccctataccctttttcataatagccgtactaatttatattcacaccaacagaatgcaagggttccctttgtccacatcctctttagtacgttatcgttcatttttttgatagtagccattgtaacaggtggaaggtgatatgtcattctggttttaatttgcaattccctgatgattagtaatcttaagcatttttcatatacctgttggctacttgtatgtcttcttttgagaaatgtctattcagattatttgcccatttttaaatcgagttatttgttttctttttgttaagttgcttgagttttttttttgtatttattttggatattaatctcttaccagatatataatttccaaatatttcttctattccatacattgtgtttttactctgttgattgtttccttggctatgcggaagctttttagtttagtttgatgcaatcttgtttgcctatttttgcttttgttacctgtgctttgggttcatatctgacaagaactagcatgtcttgaattttaccctgctaagttttttatatacgttattcttaaacagatcctatggggtagacgttagcattattacgtcagttttctggttgaggaacctgagttatgaatgccatattatttgctaaaggtcacacagtaaatataccttggctttaaatctcagcctttctaactttaaaatccatgatattatctactaaattataactgcatagacaaaggtggattattcataaactgagattcctaggggtgagagtgggtgtccctggatgtgctgtgggaagtctgtgaaatctgttccttccttagggcccttggtctggtcctctgcctggaaattgctttacccagatatcttcttgcttaattctcctgggtccttcaagtcttcacttgaatttcacctcctcactgagaccttctctgacctctgtttacaactttatcttgctgcctctgcaacgtccccacctctccaaatttctgtattcccaggtctccttaccttactcatttttaatagcactagcatacatacaattctttacatttattgtgtattttctttccctgcctattaaaatatgagtttcagaagggcagaaatcttttccgttttgttcactcatctgttttaagcacctgggatggcacttagcatatcataggcattcaataattgaataaataagtgaatgattcagggtgggaattctctctgaattcacaaataagatttattgtttaatgagcttgcagctaggaaaagagttcatggcttttagcagattttcactttaacagaccggacccaaagtttacttcaagcggtagtgattcctgtgcttttaagttgaatgaaaaaaaaacatggatgctcatttttagttgtatatgatgcatagaaatgtataatctaatgtagattaatgtaataactagtataattattaataactaatataactaattacaaattataattaaatacttttatattttatatttactttaaatattataatttattacttaaataactagttataataattattaataagtagtacaataacttatatatgttaataactagtaaatgctagttcagtttgcagttttccttgggatcattttggaaagataaattatactttgcatttcatttttgttttgttttgagatgtgatcttgctttgttgccaaggctggagtgcagtggaatgatcatggctcactgcagccttgaccacccaggctcaagcagttccacctcagcctcttgagtagctggaaccatgggtgcacaccaccatgcttggctgattttttttatttgtagagatgaggccttgcaatgttgcctgggctggtctcaaactcctgggctcaagcaatccccccgaccttggcctcccaaagtgttgggattacagacatgagtcactactcctggcctgttttgcagtttaaaattacagattgaagattattaaattttgttctgaacatgttaacatgcatatatttttgaatgtcaccatttgagaaaagaaaccgaactgtgggatttaatgcttacatatttgttataaatacacagtacggattgccatcgtagtctttgtcttctatttgtgcatgcaagtgatgtgtttttattaatttctacaagaattattgtacatgtacatgtaaaatatgtaacaaagttgattaggcagtgaccatcaagagagaggactcctgtcatcagtcaattaaatagttgcccataaagctgcacattcagtaaacttaaaagcaggaacacttgtgtggatgcaaacatagtgaggcgcattgaattccaggatcatgatctctgagttatttgtttaactgtttcatcctctttaagatcatacacccttatcttgggcatctgtctcctatgtataaactgactgttaaaagtttgaatgttgttgatcagagtgaataatttactaaaacaagtaggaataaagaaatccctcttcacgtatctacagaaatatttgcacgtgaataaggatgctaattgtagcagtaaaaacagggtgctagaaacaggcttaagtgtccattaatggaggagtgactaaatcaatgattttatatttgcactgtggggatactctgcagctattaaaaaattgatttagcctgggcaatatagtgagcctttatctctgcaaaaattttaaaaatatcagacgagtgtggtggcatgcatctgtagtactagctactctggaggctgaggtggaagaatcacttgagcccagaaggcagacgctgcagtatgccaagattgtgccattgcactccagcctggctgacagagctaagcaagactctgtctcaatcaatcaattaatcagtcaatacagttgaggtaaaaataaattcctaggtattgaaatatttgcaagtcatgttgttaagtaaaaagaacaagttttacgtaatttgtatgttttaattcttgtgaaaaattgcacttgagtgtatggatatgtcctatgtataaaataatagagaattgttttccaaattgtaatgatggttaattctttctgaagggagagttggaatagaaatgtagggtgaaatattgtattttatatactttaccactaattaaatattttatgaaactacttaataatggcgaaatactgcctagtaactacctaacatttaaaacattttctaaatagacatacatacactccaaactgaaatggattggttttccttgccttaaataatgtttctttgcacattacttcttttcttttctttttttttgagacggagtcttgctctgtcacctaggctggagtgcagtggcacaatctctgctcactgaaacctccgcctgctgggttcaagcaattctcctgtctcagcctccaaagtagctgcgactacaggcacatgccaccatgcctggttaatttttgtatttttagtagaggcggggtttcaccatattggtcaggctggtcttgaactcctgacctcaggtgatcgcctgcctcagcttaccaaagtgctgggattacaggcatgagccaccgcacctggcctgtttctttgcattacttcttatccattctcccctcaacactgaacctttgctcttatttataatttacttgatgacaaattttaagattttaatattcaacagttattctgttttttaaatttaattttatgaacacatgtcttttattaaaaattctaggctaggtgcagtggttcctgcctgtaatcccagcactttgggaggcttaggtagttggattgcttgagcccaggagttcgagacctgcctgggctgggcagcatagtgagaccttttccctgcagaaaatacaaaaattagcctgttatggtgacatgtgcctgtagttccagctattcaggaggcagaggcaggaagattgcttgagcccaagaggtggaggctgcagtgagctgtgattatgccactgcactccagtctgagtgacagagaaagaccctgtctccaaaaaatacagaaattctaaagctctctcaggggacaaggttggagttacttgccctctgaaaatggaacacactagacaaatgtttttatgtcaactacagtgatttgaagttagtcactcaataaagactagtgagttaaacatttctgaaacagatttaggtaattttctaaagattaataatcatgaatattgaagtagacctgtagtttatttgctcatgtttgtgagataaaagattaaggcttgcagagtaacagttatttcacattcccattggaaatgtggtaaatgtgcaaaataaagaatatatgctgggtgcggtgactcacacctgtagtcccagcactttgggaggcctacgtgggcagattgcttgagtctaggagttcaagactagtctgggcaacatggagaaaccccatctctagaaaaatataagaattagccaggtgtggtggtgagtgcctgcactctcagctacttaggaggctgaggtgggaggatcacttgaacccaggaggtcgagtatgcattgagctaagatcaagccactgcactccagtcgggcgatagaacaagaccacgcctcaaacagtaaatatctaaaaataaaaaatatataatataatcatccatggcactttactgtcttgaaaagttaaatgatagacacttaaaatttactttttaaatttcgaagttcactattcttgcttctagagtatagaattacactcctttttcagagttaggacaaattattgaaaatgaatagctctgaaatagatttatttttatgaacttaagtttttatgaatatgcttttactgaaaaaagatgttgtatatttaatttctaaaattttattttagacttgtcttgctactttctccagactctgaaagaggaactttattttttctggatgggtcattggtcatttttactcagtggaaattttttataaaatcacattggtaatttggttaaggaagggtatttctctttgtaccacattgaaaagtacctgtggaatttaggctcagcctattttctcctttttgtggtgaaaagtcagaaaagctgaacagtagtaaatgcagttggtaattgaaaaccattaagataaatgcactcattatttcctttcaaaaatttcctcaagttcaaaataaacccaaacaatcgaaattattttctttattttgaaaataattaatccattaccttcaaatcacctttaagaatttctattgcaacttaatcataatgattcaaaaataagaaaaaatcattagagaggagacacaatgttggtggttcataggtgaaggggatataatgttgagcatattctttcaattttcttgaggtttgaagttttcccaaataaaaattttgatcataggaaattcagtgtaatccatgttcttttctgtggctttttaaaactgcaaagtgaattcattcttacctgaatactgtaattgcctgatggattcttccttcccgctgcacagacaaaatcagtccgccgagaccacagcattacagtagagaaagtttaattgacacaatgctggttcatgctgaagaactggagttataacttaagtcagtctccccaaaggcttgaagcttagggtttttatgtacaatttggtgggcagagggctggggaattggtgctactgattgggtggggatgaaatcataggggtgtgggaaccattcctcatgcctctgggtgggaccacaggatctgttgagttatgagtaaggggtcccctgttatcatccttgctgtaaggttaaactgtaaactaaattcctcccaaagttagcttggcctatggccaggaatgatgaaggacagcttggagtttagaagcaagatgaagtcaagtatgtcagattcctattgttacaattttgcaaagacatttcaatctggccattacagttcatgttgtgatacaatcttttttaaaggtatttaaagtcacaaaattcatacattattttatttgcagccacctctatttgttcatagtctcactttccatattctatctctagcaaatggatgtcagtgttaatactgggcagtgtctggctaggttttcattttcattttacatcaggttgttctcttagtaatccagcgcattctggacaactaaacactagagtcagggactgagctagatgctgtaggtgcaaagatgcctgagggaagcctggccctgataggtgcttaatgaagatctgagtttgctcactgttactgtagaacctctcatctctgcaggctgccttcttctgacatagtctcattttgagcaggaaactcatgtttgttgttagtgatgttctctgcaaagtcccccctgccctccttatgttggtgtgaagtgtcactgaaatgagccactctcctggacgtcttttaagagtgcatctagtctagttatgtctgctcaaagcatagctgactgtgacatgacaagatttgggttattgtggggctctctctgctccttccctacctgtgacaccttccccagtaaactctatttcccatttacatcttgtgattttggcactgtggattttgcactctgtttacaagcggtgtgtcctattattaagtagctctcttttgaggagggtagacctacatacacgtagacttcgtggattgatagcacagacaggagatggattacctaactactctgagcagcagttctctattcctagaataggaacagcgtgtgtatagtgcctggcagattcatgaaggcttttaaatctatgaccactcagttaatgccttctgtcctcctactcatctttaccctctgagggtaccctccatgtaaagttgtttttagtatttaagtataatatccataagataaactgctttctccagacagtatgtatgcacttaataggtatacttgtaaaacaccaaatagcaattctatgttcaggaccactttgttgatgggtagatttgggggtgcaatgccacctatacactgcaccccaagctgtgtcccctccaagtgtctcctttccttaatcccactgaggtgccataccggtgagcagaggcactatggtgtttaatccctttctactggtcttttatgcaattcaggttcctttttagataagaatcgttctttgctgtttgactggtttgctataaattcattgattgatagcatttcatttgttggttcaagtaacatttaaacatgtgatatatgaataggctttctagaatgtaaaacaatacatataaaagcaataatctggccaactatgagtatcattcagagtgttgatactttatattattgattttgcttatttattgatcttctgcgaactctttcttttctttctaatggtactcaagtactacttcattcacttggctgacttctcccttcccctgagccgactgtgcatgtgtcttcccaactctgtgttcagtgacactatattggttgccagggtgggagtgtttgtgcaacaggtatcaacaaacactacatatacggcttccccacctcctgaccctttttttttgtttgtggagattctattagatgtttattagcacgctcctggctctctgatttcttcataccagttcttgcacattggtggttattcctccagaagttggtggttcttcttcctgatcatggctttaacagtctgttccttgcattgatttttgtctttcacctgtaagatcaaacttctggttactgcagatgaatctgcatgtctgcatctgcttgtctggtctgcccacccccattcctctctccatgagtccctggaagagttatggtatagaggcacttgggaggtcttttcagtttccttttcccagtacttacttagtgacgttgctttttaattttttttatttgttttctaaatatataatacttatacatgtgatattttgttatatccatagaacatataatgatcagagtactgggcatgtctatcaccttgggtatgtttcgagtcctctctgctttctattttgaaatatataatagattgtttatttttttcttttaatttttttttttatagagactgggtctcgctgtgttgcccaggctggtcttgaactcctgggctcaagtgattggcccatcttggcctcccaaaatgctgggattacaggtgtgagcccacgcccagccagattgttgttaactgtggtcagtagattcagcttttatagaaaccttagggttttgacccgaggatgtgatttaaaactgatcctttccaacttctcagtcctatccaagttgcaaggccgactgagtgttcctttaggatgttttatggctagcaatgtcatgggtttttaagtgccttgagaaaacagctgagccatagcagtgctcttcttaggcatgtgggtacagtagacatgcttctattttttaaatatgatttgtactttgtaccttgatgatatttgtttctcccccctccctttttttttttaagagcgagggtcttgctctgtcacccaggctggagtcgctctgtcacccaagctggagtgcagcggcatgaatatagctcactgcagtgttgacctctggggctcaagtgatcctcccacctcagcctcctgagtcgctgagactataggcacgtgttaccactcccagccagtttttgtgtgtgtgtttctttgttgtaaagacaaggtctcactgtgttgcccgggctagatgggatttcttttactgtcagaagaaatgagatcgttaactattaatctctttgaccttgtcaattatttaactcaactactttgacatttgcaatgttattactagtgtcacaagttttctcatggtttaatgattcttttagggtagaattttactaatatctgacttgctactctaaagaacgtttatagtcatcaacttgttccccctttcccttgcaattccaattttttaaaaaatcctcatatataggggtgattttcagaatgatagagaacagagccaaaatgatttggccacgtaaggagtgggtttcctacttaatgtccaagggacagacctaagcctgcgaaactcagcgtggtgatagagacctgtgaggcaggtaactcgggacccttagagataaagaagaatctggataaaagggctatgagacttattttagaaattgcctaatgacagattcagggttttgaataggaaatagtatctggtagtcaaaaggtttctcaaataagtggaaaaaaaaaaaaaaaggtagagctggcccttgaaatgctaatctgaataacaaaagaccgagctgactttccaggaaaagtgtgaaaggcttctgaacccactttccttgtctttgtctttgtgtgactgtactgcccattgttcctacacacaattaaacacatccatgctctggagtcaggtattaatgcataggtgttatggtttttaaaaatatacctaccgtcctattttttaaaattgactttagtttcttatcagttacaaagtcttatatatatgtgtgtgtgtgtgtgtgtgtgtgtgtgtgtgtgtgtatatatatctgaagtactgcctaatgttttttcaagagagaaaatttctgttagtagtaacccacttcaccctagtctattatttggagaacaaataagcagtcatcttgatcctgttttatcttaacattttaagagtaaacgtttcaagagtaaaacagttctgatcccccagtgtgacctcaacaaatatttcaaatcttttatttttgtaaatgaaagtaatgtcttctgtattttctatttcttatttggcctatgtatcatttgtttaatcatttttctaaaaattgtaatgtctctttctctgaaggcatctctttctggtaaatattgatatgaaaatgtttcatataaaaggagctgaagttcttttagtccatttgcaaatcatgaatcccggatttaattatatcgcaagggaagaacctgaggaaatcaaaagtactaacataattgggccaaactgtgtaatcaaaagcaaatgatatggttattaaatctaatgaaacgatttcccagcatttaattcatttctcggattcaagatattttagtaataaatacatctgttgaaatggacattctgtgttgtcaccacttttaaacagttcttttctcaagaccatttctggtaagaaatatttctaaaggttacaccttaatgcagatagtggatgtctgctagggctgggagaaaaggaaggtggaatgggaggtaaagtgtgggtccttattaaagcggaaggagaggaatgaagagagtacatcgctttttaaaaaatgttattctcttgtatcagcatcttcattttacataaaatgaaaacatgccattgcttggtaaaatatatatgatatctacgggattaatggctagtttggctggggctggggttcatgcctgtattcctagcactttgagaggccaaggtgggaagatcgcttgaggccaggagttagagaccaaaatgggcagcatactgagacccagtctgtacaaatatttaaaaaattggccaggtgcgatgatgcacacctttagtcctagccactcaggaggctgaggcaggaggattgcttgagcccaggagtttgaggctgcagtaagctgtgattataccactgtactccagcctaggtgacagaatgaaaccctgtctcttaaaaaaggaggaaatacacacacacacacacacacacacacacacacacacacacacacgactagcttataaagattttgttaaaatacatagaaaaaaaactcctgataaacttgcaaagagtatatgtaatcattccacaaatatgattgtattagggtttttcagagaaacagaactggtagaatggagattctgtctatctatctatctatctatctatctatctatctatctatctatctagatatgtatgtctttagatatatacacacatataacatttactataaggaattggctcatgtgattatgaagtctgaaaagtcccaagatctgcagtcaccaagcaggacccccaggagaaccaatggtgtaaggatcagcccaaatgcctgcagctctagtcccccagaagatctgatacttcagtccaaaggcaagaaaagaccagtatctcagctcagcagtcagacaggactcctcttcctcagcctttttgttctattcaggtctccaaatgattggatgatgctcacccacattagggaggacactgggcttttctcaatttcctgatttaaatgttaatctctttcaaaaacaccctggcagacacacccagaataatgttgggccaaatgtctggatgtcatgggaccccgtcaagttgacatatatacttcactttcactatgatatctttaatctcacttgcaattttaaattccagctagaatggcagcaagactttttgctgatagattaaggggaataaggggtatgtgtgtctttttgtctgtctccctatctccctcctcccccatctctgtctgttagagcagctgtctaagaactgagaaggatctaagattttatcctacttgcaagctaacaagttagcctgcctcagtttcatggttgctgacagaagacctgaggctcctaggtcagagatgagaaattgtattactcttagcacaacatgcaacataagcatcagcatatttggttcagttctccttactccctagacctatggaagtgatgcccttgggcccagatggatgcctgcatgctctatgggtaatgttacaggacaggactctgagctgatgaatcttttataatggcagtaagcaagactcactccccttggccctggagggagacactgtctctgtctcccacagcttatctctgtagaggtatctttgaaaagcaagtccagaacagaagcaatcagtgcctctgtttataagacatgcagatttgcaagagacaaatggagaattgtgtcccaacacagaaaataaaagttgtgaaatgaacagtttaataagaggctggtaatgatatcaattggctcggtcattttagaaagtagtttgatactggctaccttaaaatgatcatgccatttgaaacattatgttatagacttcctccaaagaagtgaatcctaaatattgaaatgtttttatttagaaatctgtcagttactggagttgaagtgttctttgatgagtgaattgtgaaatgatgatatgtttacccgatagaatattgaatcattaaaaattgtttctttaatgattgcaataaaatgatacattaaatatttatattttattattactatgtaagaaaagaaaaacctatatgatctaaaaaaaaaactgaaagtaaacaccaaaggtaagaggaaaagacagaaatcatctcacatcagtacaacagtgtcctggagagcctggtgttctttaatcactctaactgaacttttgtgccatagaagatgaaggacacttattttttaaaacaaatatgttaccaaattcccattttctttttaaaatttatctagagggtggtgttgagcacctagttagcccttaatagttacaagacagttttctgagtacttcaattagctcatttgatttttgtggaaactctgagatagatactattatttcccacagtttataaatgagtaaactgaggcacagagaagttaagtaacttgtcaaaatgattctgcatgcaaaatccgtgttttttattactgtgctcagctgccatatcaaatataacatgtttaatactttaaattattgtatttgtttaatatcttaatttttgtttcacatttgtatcatatactgggaattaaggacaatgcaacaaatacatagctaatgagttttattttcaaaagaaaaataagtgttactctggtaagcaagccacttctgaaaagagattgattagtctgaataaaatcgtgtcaactagagggtggccacttggtcactagtgtgtggtgggagaaccctaagcagtgcagacgcccttcgtgcaaaacaagcggtgccagtgttcctggcatggtggtatctgcttgagtggtcatctgggataaatatgtataggaatgcggcagatgatggcaggtaaggtgctgggactagttattagattcagtgatttttagtaagcatcaatatgtaaatcttcctgtgtgaatcattgatgacaggcaaaatggaagaagaatgtgaagacaaattgcagtgtacttttggatgctggactaaatatcttccaagaagattcctccatgctctggaatcctaataatcaatgagaagacttacatattggaactgaattttaagattccattatgcatggaactggtgcagagatacatactttttgttgttctctgtggttagatagctttcataaatcagcaccatctgttcttttgcctttggttgtatggagtcatgttgtatatgtatcaagacgggaggcatttcatttctctgggaaatggaaatttcatggactgtgttaaatactacatttgatcagtactagcttgagataagaatagtaggaatctggttgaggggatggcgcttatatacagtgattacatcacaggcgctgaataattcttcatagaatcctaaataatttgatgttgagctttgttcagtagagcatagtttatattataaggaactggactttgtctaaaactgtaacagctgttaatttccctctacaagggaatatttttaattttaaaatatcttatttttgctatatattattatattattatatcttatctaatattgtcttttctaaaaagtatttgcatttttttcatgaatgtttttattctggcagaatataatgatcatgaattaaaattgtattacacatttcctgattttatttctttggaaggttgctatagatttatcattttgtattgtgaagcccctctctcctacagatgttttcaattgttttccatatatgatgggaaattactttttcctggtgtttcggccagttaatcaagtagttgggacattaacacgaatgccttctgcaatcctatttgtgatacctaggagacttggaaacagattccctttggaattatttttcatcaaatgtaatccaaagaaaaagtgctttaattcactctgtcaacatcctaataaatattttctctaggataccatagctcactaatagttaacatgtctctcattaagttaggaaaatcttggagggattctaaaaagtatgaaaaagaacatttagttgagtgtttttttagcaatatatttgaactcattaaaatattttatttactgttatgaataattttttttaaaaacacttgacagaaaatattgtaaattgtaccatgagaattttcattttttttttgtgctttctaaacacaaaaatcaaagatagatattttggaaatttaagtagagaagtataactttaagtttttataaaacattttaaaaattataaatataggcttttctttcaagtgataaatatccaaaatatttacttcttggacctcagaatttgaatgtagatatacagatgactggtttctagattaagttttatagtgttcctctgaattagacagtatggtttatatttcttgttttgtaaacatttgtgttcctgttttctgtggtgagagatggaggcaggattctagtctcaagtgttctagttacaagtcctgtactttttttgtggtaggatcacttaagtttttggattttttttttcttttttttttaggcataaggactcactctgttgcccaggctggaatgcagtggtatgaacataactcactgcagccttgaactccctgggctcaagtgatccccctgtctcagtctcccaagtagctgagactacaggcgcacgccaccatgcctggctcttttccaatttctgcatgagaagttaaactttagttatgttttggccccccttttctggaatcctaataaaggtagtatgtcgactgcctttttaggcaaaagtaaccactgattggtaaatcgtattgagacttgaaaaactataaatatctgaggagcagcagcttacgactatggcattgttccaagagacactggcttctctggggcatgaggcttttcagccatggtagctcttgcaacttcctgatgtgagtcaacacgcctgcgctgtctgctagagaccccaagagaatggctcctgcacagctgtgaggactgctgggtgcacactcctctggaaaacaaggcatgatacagccttgctggcaagtggggtctcctgccttacaccctgcactgtcaatccaatgccaggcagtctgtgggggccttgacagtctgcatgttagttagaccggagaagcccctccacccccttggcaggcatttcagaataaaaataaagacataatgctaaaagacttatcataaaaatgaacagcctctctgtgccactgttcccgtctttctccctaaatgtctgctctgatatttacttccatgtttctaaataatatatttatgttgctctttcctgattaccagttactgacatctgttgacttgccatatggaagataagagttgttccttttatactgcttctggtttcttgttcccatcctttcaatgctgttacatccaaagtctaatttcagtcaatagccagtgtcacagcacatggcaatgtgacaattgctcactgcataaccaaatggatactctgaatatatttcctcttctacagattttttttctcctggggcaattttttttttttcatgttgctttgttttctctgtatatatttttgattttccccttgcattctgtgtcaggtctgtcaagatgccttttatttttcaaatattcaaaagtatcagacctgagcccagggaggaggtgcaaacttgtagttgcagctatttgggaggcctaggctggagtattgtttgagcctaggagtctgaggtcagaactgggcaacatagcaagaccccgtgtcaaaaaaagagaaaaactaaaggggaatgaaagaacttttagaacgatatcagaccaattattagtttctttttttctcatggagatgtacttactagacctctccatcctcctgctcttatctgaactggtttctgcttccttaaactgccatttctcccgtgttctaggacttcccttgggttctgactgatttcttactgtgttttctggattttgctggagcacttccaaaaagagctttatataagaaagtgttcatgtgaaggagataaagatctctttgcaagtctcaaaatttcttttatctttcatgcttgatctttttgagcatgtagttttacactgaattgttttttcagtgtagaagatatgacttttagtagaatttaatatcgctattcagaaggcattgttatcatagatcatttgttaataatattcctagttttagtctgctagcaatcatccacatcatttgtcaatcctttgattaaactctgcagtttggagataactcctcattgttctcttggcattttgtacagatgactcatctaagaggaggaggttgtatatgtatatatacacacacagaacagaagtcttcattgtggacaatcttttcaaggatgtttgtagagcaagataggtataagatctcctctgacagcagcaagcaaagatactccctgtctgtctaaaagattcaggttccctaagcctagggttcttctgtgtgtgccagtgtccctggatcctcttcacatcaccttgtgagaatcttagctgaggaaccactacataaaaggaagatactctggctagcggtgtggctatgagttgtgaatagttctttgtctgtgacccaggaatcttctgccttctgccagcattgatgaaggtgtagctttcaggtattgtaaaaatcctagacccctcctactttttttacatctactttctctctgaaaatgtcttcaaccaccaccccacaaagttttcttcttcttgccatgtacttgattgtatatagcatttatttatcttttttttggtttctttactcatcctaaagacattctacattgaaaatattttgtatatagcaaagcacagtaaatatcaggtgtcagcaagtttctaaattataaataatatgttttttatttgatcgagtgggtaatatgtttcatattaaattgttttgcaaggcacagtgtatgaatagatgaatacatgtatatactcttaaaatgtcgtatatttgtacataattgccctaaaagatttatcgaggtttgttttctgtattatgtgttatctatttctgtcttcaataatgtttataaaataaccatttgttgggtaagtactatgtgtcaggcaccatgtaatgcttgtgatatggaggattttcgtactgattctttcagtactaagaggaagagtttttaaagtgtgtgtgtgtgtgtgtgtgtgtgtgtgtgtgtgtgtttgtgtttgtgatggggtctcactctgtcacccaggctggagtgcagtggcatgcatggtcatagcttactgcagccttgaactcctgggctcaagcttcttgcttcagccttcccagtagttgggactacaggcacgcactatctcacctggttttttgtagagactgagtcttgctacgttgcccaggctggtcttgaactcctggtgttaagccattctctgcctcagccttctaaagtgctgtggttacaggtgtgagccactaagcccagccaaggaagatgtttttattgttcacgttttatagaagaagggatagaaacatggaaaggtacataacttgcataaggttataaaattggcaaatgatagaattgctattcacgcccaggtctgtttaaatcttgaacccaagctcttaatgtctgtactctgctatgaaatggagagtagggaaaggaaaaagaaaaaaaaaacaaatggctgtattgtctcatatctgaaagttctttggcacagtttagtttaaattgatactatatagttctatttttttcttactttaagaaaaaaatagaggcgggatctcaccatgttgcccacactggtcttgaaatcctgggttcaagtggtcctcccacctcagcctctgaaaatgctgggattacaggcgtaagccacctcacccggccagtactgtatagttcttaaatattgatttgacatacataataacagctttgtttactgtagttataatggaattcagtgtatagttcttgctaaaagtaactacattcagtcacagcttgaaagaaaaagtaccagacaacagaataaaaccatacaggagctgataatttacacatccaaatattgggaaaatctaagttgaggttccacagcaactgcagctcagcctcagggcagtgaatgttgccatccaaactggacactgtatgtagcttcatgaaataatattctccatgctctttggtgcctgataatggccactgtgggaacaatgtgtgaattatcagtgactgttttatcactgtagtttggggcatttcatttatgtggctgtttcacagtgcaacataggtgtttcaagtggtgatacatcttggtggcatttcagtagtccttaaattattaatgaatcctgaaaaaaagatctgtaatgtgtaagattatttttgtgtcctacatctggtttataaacaaatcacatttgctctccttcctgcacccactcccattggaaaagcatgattttgggagttcgtgtttacattccaagtgcagttctcaggcacgttcaagatgttggttaacctttgaaatgtattatgtgctggtgcttaaaggagatagatgactaagaagtacatattagagcctctcaagacacagcatcatcaatcaaatagcctggcttcatgcagagctccaccatccacaaagcacagagcacagctacgactcacagaaaagtttggtgcccttagtttctacttctcatagattcgcaaaggaaatgtcagttgggccttactgcctgctttgccgtctcttactatctcttcaatgatttaatatattgtttgacattgtatcttgaacctataactcttgcttatctgttgttcctattgatggcatacacgtttctactgtgagtctctggaataacatgattgaaaatataaaatttttctccagtgttggacttcctgtcctaatatagatggcttggtaaattcccaatgtgtgcacctatgaattatgttgaaaaaagttcacaataaaatcaccattgtcaaatttatgtaatagaaaagatcaacctaacaaattatatgtatacataaattatacatataaacctctaagaaacagattaaatacattttacttagttgcatttggggaacatattaccacagagattcctaggcatgattttactttaattagcaaaacatttacagagcttctagtaggtgccaaagactatgcctccatcattgtgtttggagaatctgaggatctcttaactgttctaatctggctaataagtccattgatctcagtcaggtatctttatcgttattcaaatgattttgaaaagccaacttttaactattaataatagtgaactctttaatgaaaagacagtggccgagattataaatgaaggtagattcttgggtggcttttcatttatttttgtgaactaccacgtttattccacatgcacctttttgaatactgattatcccatttgaacacctatctaatcattggtttgtaagctgagaatagtataacttcactaaactgacatgtgtaaacaccagcaaacttattgaatttctgcaacacattggagcaatttgtacaaaatattgcctttgtcaaaggaagcataggaggatgggggctgagtactttgttactttagcttgtccttttgtttggtccttcatgcacagaagtaaacaaaagtggtccattatggctaagaccttaatacctttacagatacctctaaataatcagtcgattggcttagggtaactttatgtgaaattttacgggatgaagcctgtaaaatctggaactataccactgcctgttccttttgacaagctgtgttagcaggaatcaagaactgagaaacatgactttgaagcttttggtaatggttatggtttataatcgttgtaactgttttgagtaggaagctgttttcagacatgcatttccaatgtcatgtatatttgtttatcaatacattgtaacaatggagtaatatgtaattacttcctaaaatatacatgaaaagaaatgaaaaatgaccagataagaaaattagcataaagataagttttttctttgtttttttgttttctttccttatcacagtagtatatcttattcaccttctgggatacactatctcatgagactcttgttttcaattttagctttttacaacacacactgatcctgtcattaaaggtcatccttcttagaggaaacagttaccaagatcataatgcctattagacttccattttatccagtttcctttcacattgtagcaagaaacctaacacagagtgtacttttctttgtgttggctgcctctaggatgaggatgggacagaagaggataacagtcgtgttgaacctgttggacatgctgacacgggtttggagcatatacccaacttttctctggagtaagttactgatggtttcaactaagtttgcagtatacatgtagcatcattaattgcagcaagtattctgaaagcatatggcatgaggaatgtttgtgcttagttaaaaacatgccgtgcattgatttgtttttctaaagaacatctttcatctcttgagttaattatgtaatgtaagcagtatagcatggaagttcatgtgtaccagtcctgagtttcatgccctggcaaatactattgaattataatataaaatagtatttgattgaagatttttgtcatgttaacaacactgtaaacaccgtaactcttttcagattgctttgtgtgtcaatattttgatcatgtgtttgttcttcactttgctaaattaaaaaaatttgcagacatacttgaaaaactagttagatcatgttagcattaattattatagtgcatgtaaatatatgtatttattgttgtttgaagaaatagaatctttcaagatatttaatgaaaaagggaggtcctaggttagggaccttgaaaatgattttaagtgtaaaaggacaaagaaaaatttcctgtttgttccacagtgttctgattattttaaatattgacatgtgtaaatggtaggcattctcaggacttctttccttggtagcttagagcagggagggcagtcattctggatttttttctttgactttgggcaaaagttggggatatagacattgacatttatgtacttaattctgtcttttcttggtcttccaagagaagtgagattaagcaggcactagagtcagatgctgtttgaatgtatggcagccagcacgctgagtatttacatttagtaaagtacttgccatgccatagttctgtttagactgtgggataaaatcagtttattgaagttatgctattcttagcttacaaaccaatgattagataggtgttcaaatgggataatcagtatccaaaatagaattttatgaaatttggtaaaaaaaaaaaagtaataaaaaatccatttaaccatttggcagtatggcagaatttttatgttgtcttaattagtgcatgtgattaaatctgtgcacatattttcaattttgatttgcttgatattcctgtctttatgcaggacattcatagtacataggataacttcaggtttttatattagaaacataattgaaaaattggcattttccatcacataaaattatattgtgatctttgtgaaattcattggtaataattgattgttttccagctggcttaaaatagatgtttaattgaagtactgtttccaaatattggttgttaggtaaatactgcttagacctctgatgttatatgtatatatgaaaaaatctacaaagaaagaaaaatctcatttaaatagtttagaaaattacattgtctatacaaattttcattaaactcaggctttattttattaatagtaaagattcatagacttgacaaatccatacattatgtaacgttatgttccttatgcagaatagttttgtaatagaagtaacttcatgttatgtcatataatataaatagcttcatagctgtagtcccagctactcagaatactggggcgaaaagattgcttgagcacaagagttctaggccagcctgagcaacacagcaagactccctttctaaaaagaaaattaatttcgagcaattttatgaaaattatttgatttgcagtagatgcctgttggctttgagaaaggagttttgtaagctgcacttgtagcactcttatagcggtttaggaaatagtgactttgaattgtcatgaagtagtgagcagtaaggacaatggtgatctcccttggactgtcacttacaggagtgaaaactttggtctcattggattattggaaggattaatgatgtgacatataaaagagcactttgtaaattagaaagtgttctgtagctgcaacatctttattcagttaatctttagagtccttggtagctgcaacatctttgttcagttaatctttagagtccttgacgtgagtgttgggatggaagagtttcagtgtaagtctaaagattttacttgaaagacataaacttgtattacacagaagaatagggtcggtccaagagaaatgttctgtgtcattttaatgtagttatctctgatgattgctctccctccatgccatcagactagtgttcaggtatgtagtgtttaatgttgccttcatcaccatgcttatattccagaatatgtatatatatgcctatgcacttggtgggatttttgttctgttctcttttgttgtttattgtgtgtctgtgttgttgcagttttttgttttgttttgttttggttttggtttgtttacagtacacgttcatgctccctcattcatcattgtctcacagtgatatggtaaagctcgtagaagtccccaacgatggagggcctctgggaatccacgtagtgcctttcagtgctcgaggcggcaggtaacgtatcttggaggtttttaattgaatcataatgtagagtgttttatcttcatttatgctcagatagagagtggtgttgacttagcatatgcttaataggaaacattctcatttggaggcaactgctccttcattcctatatatatgtcataatcacagaaagcacttagcctgatgaagagaggttttgcaggaacgtgaagaaactgcatttgaattatcctaataaatttattgttcatcacactcaagcaaacattttactttgctgtaaattgatgatggactttcaagtcagaactccagatgaatttgcaacgttaaggagagcttaaaagcactttttttgggaaagcttaatgcaataaaaattatctagatgacttaaatttgatttaagctttaaatttgtgtttagttcttcaattttatgagtttttttattgttaaaaacctttaatatgaaattttaaaaaattaggcaagccatagatttctgaaccttgagtctaaaaatcatgtactgtttgttaatctcaacttcattactttacagaacatgcatccttaaaaacttcaaatgttatgtcagtttccttgattctgttcctttttatgtgtgaaaggactgttgtgatatttttggttttaatgtattcaaatagtatgaattgattttccaacaaaggcttggcagacctctgtcacagacaagtgaggtgcaccgcatcctttcccatgagtctgaacttgtgcatgtttaacttgtttaatttaattgcatcttctcttacttgctctctaatgacctattttggctttttaatttttaacttatttcttttattgctatcaccttattttttttctttttattttaactttctttacatggtgcgaaaaagtggggaagttggagggtagacttatagcagtgactgagaccgtagaacatagtttaaactgttgtcaagtaattacaggcatctagggtgttgtagaagatagatgtgtgggattaaactatgcattttatttttttaaatgagtatttgaacaatggtagtactttcttgttacttgtaagtaactgtggtgagttcagatttcatctctcatggttcatgcaatgttctaaagctgaaacttgacttagaactctgctggagtatgaatgaggcttgaatggtagtgttacataacaaggtataacattcaccttgaattttcaagtggtgttatattcatagagttgtggctgcttttactttttaattctctttaaaattctttttttaactttagagaagcattaaaatttcttcaaataacttatagttaaacaatattattttcaacatggccttgcctttatttcgtgtaagaaattgagttctaaattacctcaaaagttaaattttgttttcatttctttccggagtaggaaaaaaaagataaggtaaaatgcatggattatagcttcccgatatgcatatgtcttaaaatgcctgtgaaacataactcatcacaaatgagatttaattgtgtctgtaccagctttgagccagcatttcaattacatgttactatattttctgtcgtttattgtgtattttctacctcactgtgaaaggatattagggtaaagtgaacagatgaaaagcctaaagcaaatggagagtaagatggaaaaataaacttactatctagattaagtcaaaggaaggcatttcacaaaatccaccacagtttctggttaccatggcatttagttttgatacaccaaacagattcaagaaaacaagtatgtctttgcagaactagaagttcttttatagctgagtcatttttaagccctattagtttggcacttaatgaagaaagtcgtgcacagagattttcaaagagacaaagagatttaagaaaaacagattctttataacctcttcttaggcatcaccaattttcatatggaagcagaacagaaatagtttgtgattccccaatacctgtgttgcatggttaagcttctttgtggaattgatagtcatggttcctcacagatggttaacaatgggagagaaaaagtaggtggtctgttcagattgacagatacaaatctccaagaacccagagatccccaccttcctcattctcagaaatgctcggaaatggattcctgttacttcataagaaacctttccaagcatttctgttgtgacaatccctgtgttaggtgctaggaaacaaagatgaacggaatatgttcttcctccagagatttgcagtctagacggagtgatagccaagaaatcacacaattataattatgtgataaatgttgatatagttatataataggtgctctgtgagctgataggggaagaatagtctgaattaggcaactgaaaatggcttgttgcggaagatgattttaaatgtgatgatagcttgtaaaggtagctgtgtcaacttcatggtggcttgtgcaagagtaaattaagcaatgtagtatagcaggaaggaagaaattaagtgaagttaagaaattgcacatatatctagtaggactacaataatatatattcatgatatgtaagtagaaatttccaagataacttcccttatataaaactccagtcattcttgggccttctcaattttggaggataactaattgaataacagttactgaatacttacttttataaaagtgacaaatacatgtcaatattgctttctcatttagattttcaaagtcagagcatctaacgaataatgcagaataccaattgtatattttgaagagaaggaacacaacccagaccacctcaaatatcaaatgtcattaaggaaaatagtaatgtaagcttgtgaagttaacgttagagagttttttacagccatgtagatcttattgtgacctgatgtgtgatgaagttttttttgttgttgttggtttttttgtgtttgttttttggttttttttgagatggagtctcactctgtcacacaggctggagatcctggctcactgcaacctccgcttcccgggttcaagcaattctcctgcatcagccttcctagaagctgggactacaggcatatgctaccatgcctggctagtttttgaatttttagcagagacagggtttcaccacgttggccaggttgatctggaacacttgatctcaagtgatccgccggcctcagcctcccaaagtgctgggattacaggtgtgagccaccatggctggcttaagttttttaaaataagaatcttgcactgcttactttcaaagctattttttagactaggttgaatgtttttcaatcaggggcattaatgacaattagctcgtcctccaacccctgtcttagttgactacctgctgatatgtagaaatagagacaaataggtagagagacaatattatcttccccatgatgatgtttttcttttttttttttttttttttttttgagacggagtctcgctctgtcgcccaggttggactgcggactgcagtggcgcaatctcggctcactgcaagctccgcttcccgggttcacgccattctcctgcctcagcctcccgagtagctgggactacaggcgcccgccaccgcgcccggctaattttttgtatttttagtagagacggggtttcaccttgttagccaggatggtctcgatctcctgacctcatgatccacccgcctcggcctcccaaagtgctgggattacaggcgtgagccaccgcgcccggccgatgatgtttttcttgagttatttccttgtatatgttattcaaaaataaagttaactgatcctcatctatattcgttcacggtttcattactttggtgatttctttttttaaattattttcttagtagaaaaacatttacctaaaacgtttcattaccttggaatcaatttttatttcatccatatcatttcatttcctcctgatttaaatgagaaccatcggctgggcgcagtggctcacgcctgtaatcctagcactttgggaggtctaggcaggtggagcacttcaggtcaagagttcaagaccagcctggccaacatgatgaaaccctgtctctatgaaaaatacaaaaattagctgggcattgtggcaggtgcctgtaatcccagctacatgggaggcggaggcacaagaattgcttgaacccaggagatagagtttgcagtgagccaagatcacgccactgcactccagcctaggtgacagagtgagactctgtctcaaaaacaaataggaaagataatctctttatttaaaccacaaatgccactattttcaggaaggttatgccaaataattgtgattacctttggcagaagaaccttgcttttttttttttcttttttaatatttctagaacctggttgtaggtattggtctacaggaccataggtactgcttagtgaagcgtaatcagcacaggagcaaatgaacccatgactatccatattagatatggtgttactatattaacaaagaaacggtaatgatacatcctggcctggatggtggttaagaagtatttctgacactttctcatgaaatagatatatgattatgatataatgttaagtatataaaaagcaacatataaaattgtgtgctaaaatagggactggacctatgaaatgataagattttgtgtttgaggctggacatgatggctcattcatgtaatcccagtacttttggaggctgaagtggaaggatcacttgaagccaggagttcaagtccagtcttggcaacatggcaaaaccttgtctctgcaaaaaatacaaaagttagccgagtgtgctggcatacacctatggtcccagccacttgggaggctgaggtgggaggatcacttgaatctgggagtgtggggctgcagtgagccatgatcatgccactgtactccagcttggcatggcagagtgagaacctgtcttaaacaaaaacaaaataaggccgggcatggtggctcatgcctgtaatcccagacctttgggaggccaaggtgggcagatcacctgaggtcaggagtgcgagaccagcgtggccaacatggtgaaaccctatgtatactaaaaatacaaacattagccaggtgtggtgatgggtacctgtagtcccacctactctggaggctgaggcataggccaggcgcggtggctcacaccttaatcctagcactttgggaggctgaggcgggcggatcatgaagtcaagagatcgagtccatcctggccaacatggtgaagccccatctctactaaaaatacaaaaattagctgggcgtggtgatgtgcgcctgtaatcccagccactcagaaggctgaggcaggagaattgcttgaacccaggaggtggaggttgcagtgagctgagatcgcgccactgcactctagcccaggtgacagagcaagactctgtctcaaaaaaaaaaaaaaaaaaattactactattcttacttgggcttcataatctaacttaaagtagatactctaaatcttttcccctatggaaaacaattatggctaaaacattttaaattaattaattaagtagaaactgggtcttgctttgttgcctaggctggtctcaaactcttggcctcaagtgatcctgctaccctggcctcccatagtgctgggattacaggtgtgagcggctgtacctggcctaaagttttcttctctggatcttttttttttttccttttgagatagcttctcactctgttgcccgggctggagagtagtggctcactgcagcttcaacctgccgggcttaggtgatttttccacctcagcctcccaagcagctgggactacaggcaagtgcctccatgcccggctaattttttatattttttgtggacatgaggtttcccaatgttgcccagtctcgtctcaaactcttgggctcaagtgatctgccagctttgtcctcccaaagtgcatggattacgggcatgagccaccttgcctggcctggatcttttctataatggacatttctcacttatttacatctacctttattcttaagtctgtggcacttaaatttgtttcacattacttttccttgtgaaaatagtaattgtatgttggtgtttatatacactttttttttttttttaagatctagtatctactagttagcatttttggtgcctttgatatctcagatcaaagattcacaaactttctgtaaagggtcagataatcagtattttaggcatcatggcccagaaaatctgccattgtagcatgaaagcaaccattgacaagatataaacaaagcttcatttacaaaaacatattgctggctgaattgactcataggctgcagttgtcagcccttgccctagggaaccaaacaaataaaaatggctgccatgatggttttacattctagtatttttcatgtctaaaacttcttcacctctgttttctattcatatctttgggggacaagagtgtacaggattttgatttccacttactgtttgataagaaagcctcttttgttgtaactacatattaattcccagcagtgcatgtccttgattctcaggaagaagggaagttgaaaaaaaccatataagcccatttaccatactctcattagtagtatgtactcacagaacaatccttcttaacatctacttgtcaatcataagacttaaggaaaaatctaaagtttcacagttagaaaatcaggccctgtgaagatggtggtgagggaaatgaagggactctgggtgtgggtctggctttctgctactgactcatgttggcagatatcttatttattaatttattctcaacttactttttacagatttgccatcatttgatttgtctgattaactttgatttttatcccaaataatttttttcatctgtttatcttcaatacaatattcagaatatcaggtgaagtgtcaacatcctttggaaaaagcttcttcaatttctgtgttaaagtttatttttatgacttttcccctctttatttatttgcttagttacattattgtccataaattccatcatgaagctgaaaaatgaaatcacatctctaagagaatattttttatttttaaaattgatttattcttttttttactttctttctttctttatattttttgagacagggtctcactctgtcacccaggctggagtacggtggcaggatctccaggctcaagtgatcctcccacctcagcctccctagtagctgcgaccacaggcacacaccactatgcctggctaattttttgtatttttggtaaaggtggggtctccccatgttgcctaggctgatctggaactcctgagctcaagtgatccacccacctcggcctcccgaagtgctgggattacaggtgtgagccatcacttctggccactaggagaatatttttaatgttttgcgtttttgagttgaaataaaagtgaccctgttggaaaatatgtatttcataagtattattatttgcattctatttaaacctgaatatagattaattagaaggtggttaaaataatctatatgcagattgtattttgtaattaatctatattcagaaaatcactgaaatataaaagtttgttttttacatcctgcattcatgtcttgaataatttccccctcaaatataaactgatgtttctctgtctacaagactagtagtcaaacatctttggatggtcttgagacataccatactcatccatttaattcagcagaatctgagcttcactctcccctcaactaagatttacatgattataattatattgtttgtcatttttatcccttcctgtctgaacaaaaactgtatggaatcaacaccaccgagctctgtgggaaaaaagaaaaaccttctcccttcgctctgctggaagctggagggcgctaggcccctgtgcagtagtgcatagaattctagcttttttcctcctttctctgtatattgggctcagagagtacactgtgtctctatgtgaatatggacagttagcatttaccaacatgtatctgtctactttctcttgtttaaaagaagaaaaaaaaaactaaaaaaaaaatgaggttatagaaggtcagcaaagggtgggtttgagatgtttgggtgggttaagtgggcattttgacaacatggcttctcctttggcatgtttaattgtgatatttgacagacatccttgcagtttaagatgacacttttaaaataaattctgtcctaatgatgacttgagccctgccactcaatgggggagtcagcagaacctgtaggatcttatttggaattgacattctctattgtaattttgttcctgtatatttttaaattttctttttgtttcgctggaaaggaaagatgatgctcagttttaaacgttaaaagtgtacaagttgctttgttacaataaaactaaatgtgtacacacacaaaaaaaactatattgtttgttatacccttttgttcatctaagatattctttatcattttttgctctattatgtattgaaaacgcaatttattttccccagatttggagttgggaattttgtattacctctctgtgtcagtcagtgactgacttgaccttatgttgtcctcgttttattggcacggggattgtcaggactggggaaggataccttgctcagtattttttacgtagtgtggccttgggcaagttagcctcacttagccctactccttacatatgaaggataggaatcatgacttttgtatggtttaaataagaaaatatatgtaaatcatttagcaaggtccttggcagtggcagctaataagaatgatcaaatcatgagaagagattttatactcaatttatcttttgttatgtgccttgaaattccctccagtggtgcttggtattctggtgcttggtattctaggtaggtagtgattagtctacccaatcagagaaagtgatcattttcctcttatatcatgaatctgggagaaaatttactattatgtcgtaaaattgagaatcccaatacacatttgtttagttaattgggtacatatgctaatgaagaattacagtcaatttgagcttcacaaactagctgagaataaatatgctcttgaacttttgagtactcaattttaatttaataacttttgaaaaaaacgcaatttaactttatttgctgaatcaatagtcttttgtctgaaagttttcaattgtgcattctcagccgcagactcatttgttataataaagaactataacatacgcattggttttagagagacaagttgcagtttacacttacatgaatcatgtctctttatatatagcaatatgacatctgtgatttctgctgtaatctaaaggaattttccatttttatttacctttttggcctgatttatctcattcattgaagtttttctaaaaaaaaaattaagatttaaagttttaacttggcattcctttaaactttctccttttggtgtccatgctttcagtggcagtactttctgggctcatgtaggtagttgctggccccccatgggctgtactcagggagctgagcggttcttgttgatgagaccctattctgcccactcatattctgccttccctaccgttgtgatgtttatactgtgtcaacctttattaagatgaattataatcatttccatacagctgggtggcagttgtggtagtttacattatcaacgcaaaactcagacttactcagccaatttggatgtcaataaaacatttgttacttattttcagttttatcattggttgtaatttatacttagaattgaaaatgttaacatgtgtgactgcgtttgttttaattaagtgtataattaggctaatgaaccttgtaaaaatgtagtggtgcaatccttaatataatctaagtagttaaattctaattatgcatccaaaatcatgtacaaagaagcagcatttcaatggctcgctttgtgctactgtaccctagcttgtcttttttttttttttttttttttttttaagaaacattgttcaaaaacgaagtcttgaaagaaatatgcatgtaacatacttttgtattaggaaaattattcagaagtgatatttgtatgcagcggatctagtgttttcttcttttcaaattttgaagaaaatataggagactagaagaggaatagatttggggatgtttcagctccatcaggaaaaatccatttgcttgaaaagcataaagccaagtagggtttatcttagattcataaggaaggtagaggaggttctgtttcacataaccctaaaccctataatcatttcttcttaaatctgcgccaccccactaataaatgcccaactcttttctcttatgtcttttgtcctagcataacaaatctggggttgttctgctcttggaaccattccccaaacagagcttactccaatgcctcctttcctgacacctacctcttttattttttgcaaagtggtttcttcttaggatggaacatggttgacccaataaggaattctggtattagctgccaagaaggaacactgttctctctaccagcacactgacgtgccaaaatgtttagaacttcatttgctttgattactttctctaataaaactgttgcagcagccataccataggcagttggttctttattactttagaacaaattctgatttctagttgagtttgcaaaatatatccctaaaatttgtttttaattatattgtttgatacagctttaagttgcaaatgagggctatggaaatgtatctgctcgcgagcacacatttttcaggaaagtgtctcttcttactacttttgatttccttcggaggttcttttcattctcagtctagctgttatcagttggattttcttgtgacttttttttcttttgatagttcattcccattcctttgcaatcattttcacctagtggagtaaatgagataattttgcagattgtaccactttccttttaaattaatccattctttttgagagaatgattctaatagtgtggttaagtacttagaaatcagcaggctactaacttcaccttaattcagtctgttcccttgattccctcatctcttgctgtgtcagtcagggtgatgttctttctcttctgcagtcttcttccaccctctatctcccagccccccatcaggtctcttgtactgagtaaaaggaatctgagatctgagattttcatgacttataacaatgttggttgctaaagcctcagttaataaatttccattatagtttctatacgtgtgtggtgtatttatgatttgtagaatttctactgtatgttaggattgctaatgcatttggccattgatgaggacttatttagaaagacaaccattcaagaaatggaacattacatgcttttctactttggattattagtctagaatgattaccagaaaaaaaacacataggtttaaaactgaaaaattatgagatgaatataaatctgttcatctacttatctgaaaaaaattattgatgttacttctagaattaaagagcagatttcagctggcacagtggctcaagcctgtaatcccaatacttttgggaggccaagtccaggagttcaagaccagcctgggcaacatagtaagaacccaagtctacaaaacaaacaaacaaactagccaggggtcgtggcacacacctctaatcccagctactcaggaggctgaggcaggaggattgcttgagccccggggtttgagcttgcagggagctgtgattgagcccagtatacctccagcctgggtgacagagcaagattctgtctcaaaaaaaattaaagtgaaaggatttataagttacactgttttaagttgtcataaatactgaaaggatgtatccaagatagtttcataaatttaaataaatgatcggtgctaattaactgctaagtaatttccattgaagaccgtttatatatatattttttgtaaaaattttctatggactattttagattacacaaaatataatacataaaaacatactaattgttagtcacttacatttgcagtaatattgtagtcatattgggaaatcgcttatgatttcaccaattaaaaactcattaactggagtgagtcttggtagggcatatttttattgcaaggactgaaagcatacacattccaaagtgtgtctggtttatagtggtggcttttaactacagctgtggcacctcacatgtggttctgttatgattacctgtgggtgactgagacatcgtttccttcaagatgttctttgaaactgaagtggtcagatatcttctgcatgttctagtggtaccagtaactgtgatttaatttaatttcttgtattaatcttcctcattcatcggaatcatagatatatcttaataattcttttttttttttttttggacggagttttgcgttgcccaggctggagtgcagtggcgcgatctcggctcaccgcaacctctgcctcctgggttcaagcgattctcctgcctcagcctcccaagtagctgggattacaggtgcccgccaccatgccaagctaattttatacttttagtagagagggggtttctccatattggtcagtctggtattgaactcctgacctcaggtgatctgcctgcctcagccttccaaagtgctgggattacaggcgtgaaccactgtgcccagccaataattcctttgattcctatgatagaacactttgttcagttgcagatagaaacaaacaatagggaatcctagggagataaattatggacatgatcacatttaaacaataacttcatttttggtttggcatattatggaatctctttctcccaaatatgaactgagagttaagttgctcctgaagataaatcagtgtactttattcttacctttgagttgagataattttatgtctttatatagctgcaataaatgataataagtaactaaatattatctacataatattgtttttactagtcactaatatttttagactcatacactagtaggtgctgattctcaacgctaaaattacaattcttgcaagctgataggcttcactctagtataatgccaccttattatatttattaataaaagttagaatgaaattaatcgttgaccttactaatatcgtaaaaatgttaaactgcaaaattacaagtgaaataggacttttgtctgagtttaatttatttcagtttcatcatatctttagtagaaatgatactttcatgaagaaagaatctgaatctaaattctattcacttgtattctattttgcaaaaagcttatagaaatagacttgtttgcctcagctaacctcaatcatgccttcattcagttgtcatttatcaagaccttactactagttcagtgcttgaactgctgaatcttatgttctctgtctgctaggagcttatagtccactaatagagataaggtatgtatataagagaagaatatgataaatgcccatggaacagatacaacaattactggaaaagtatagaagcagcagctatctattttggtatatttctactggaaaacatacacagatgactgcaagttgtaattctcttggaaatcatttagacattatttgaaaattagggtgtcttcaattttaatttatactggattctcaattttagtgcctgtgtaggcatttttgtctctttattaggattatgaaagaaaatacaaattttggaagtaaaaagactaagttcatataaaaattttaatatcatgatacaaaatttatgccagccatcaagtaattaacagtggctcatgcctgtaatcccagcactttgggaggctgaggcgggtggattacctgaggtcaggagtttgagaccagcctagccaacatggtgaaaccccagctctactaaaaatacaaaaaaattagctgggcatggtggcgcatgcctgtgatcccagctactcaggaggctgaggcaggagaatcgcttgaacccaggtggtggaggttgcaatgaaccaagatcatgctattgcactacagcctggacgacaagaacgaaactccatctcaaaaaagaataaaataagactaaaaaaataaaaataacagcaatcagagctaggttaagacccctgttgcttatactgtgatttaaagaagtatttcttatttgtcccagtctgtatagaatgtcctgtcagttatgaagttagtgttctagagcaagtagggggtctctcaaaggtcattcacacttttctttcaacctgagtgagtacatatgtggaagagatgaatggtgattggcattatttgaacctctcactgacgtttttctgttgggtcatttgtttttccaaatgggaatattgacaataaatgacttacttttgggagacctgacaggttttgaaattcacaatactaagcactatcaaattcaaatgcaaagcatggaaactcctttattcctgaaatctttcctattatcattctcaaacctgcagtgcaatgaggttagcttttcctcattacctttactttcacagaaagatgggagttgcagtcgtcttttaagctagcgtgccagctggcttaaaacagaaaattgcccaagccattcaaaaatacatgcttatccatcctccacactgcaatacccactcaaccattaggcgggctctgtttggggcatttgtaaacagagagagtgttatagcttgttctagaaacataatactgaccagccagaaactgattttttacatttatggaagggatgcatttttacatgtcattttaacgttgtggtttttgtctgtcatttaaaaatgtatgaatagtcattttaacatgctcctttgtaaggacatctttgtaaatataataacagcattaaagtggtaaggcagtgtgcatggtggagatattacatgtgtaatcatttgcattcttaatgttccagaaccctggggttattagtaaaacgattggagaaaggtggtaaagctgaacatgaaaatctttttcgtgagaatgattgcattgtcaggattaatgatggcgaccttcgaaatagaagatttgaacagtaagtgtgtgctcgctgcacttctgttcttacttgcattaggcatgacagagtgcagtcagttgaaatgcttcaaacatgtctgtgatctcagtctgtatactggagaggaatattttctgccattagcttttaaaaatttaaacatactcagtaattaataccattagactatatttcaaaatgtcctctgatggatatagctcttcttaagtattatggcccccatttcaactttacaattttgctggttcctctccttttggaaaattgacagtgtgcccatttttatcatactttaactcacccgtccacctttgctgcacacagtttctctagatacaaacaagcagataaagctgtttgtatctgcttgaggttgtattcagatacactttatcttgggttgtattcagatacaatattgggttgtattcagatacactttatcttgattcaggcccttagtcaatgaaaaacataacagttggccagttcttataaaacaaggcaggagcaaacagaactcttaagaacttgaggtcctgaccagggaaccagcatgagaaagagctgcttcccaggctggttgtatgggtgcactgtgacccacagctgtcaacattttgaattattgagcctggattgctgttcttgagatttttacatataccaacttaataaataattaatagttactttctatagtcttctaagtgtgtgtgtgtgtgtgtgtgtattttaaaaattttaaatacacatctaacccaatccaatattctaaatataattataaagctctgtctttctttgaaaacttaaattgaagtattttgtaatgtctacaagttgtattagacaatgttgtagagagaatgttccatttggtttctattattgaaattataatacttgttatacttaaaacatgtttaatgatttacagttgagaggacagaattttatctgtagttgtagataatttttctatttttattgagagaatgagaaatttatatttgaagaaacagctattgatagatcagagctgcaaacttgattgataaatgggttattagaattttgcttttcaatttcaacagcctgtcagttcttattgcttaattagtaaacttaattaagctcataatatcttctagtctgccagtcttaatttgctaattttctattctttctcaaacccagagcacaacatatgtttcgccaagccatgcgtacacccatcatttggttccatgtggttcctgcagcaaataaagagcagtatgaacaactatcccaaagtgagaagaacaattactattcaagccgttttagccctgacagccagtatattgacaacaggagtgtgaacagtgcagggcttcacacggtgcagagagcaccccgactgaaccacccgcctgagcagatagactctcactcaagactacctcatagcgcacacccctcgggaaaaccaccatccgctccagcctcggcacctcagaatgtatttagtacgactgtaagcagtggttataacaccaaaaaaataggcaagaggcttaatatccagcttaagaaaggtacgacctatcctgtttttgttttgtggaatttcttttcttagcagcaacacacaagggtagaaatggaatttattttaaaagtcaacctactaacccaaagcaccctgagtcttatctaattattttgtgaaagaactgatagattttttaaagttacttaccttttaacatatttcaaattgtatttcttatatgtctcaggtttattttgctctgtagaaattaaaatgtaaaagtgcagagaataagactatgtctatgagaagaagatagcagttactgtagtaaaatttttgattgtgaaagaaaatggcttcaggacattaatatcaaatgcagaacaatagtaaggatttgaccattttgactgccccatttgctgtataagtccagccctcaaggaggactttagaggtagtgcacgtcaatctcagtatttgatgtggggagggaccaatttgtttgaggctgccaggagtttatagtaggttgctgagaagccaggccattgactcttgtcttttgttttcttgtattattgcattacttccctttcttttttttcttttcttttcctctcttttctttttctttctttttttttttttttttttttttttttttgagacagggcctttctttgttgcccaggctacagtgcagtggtgcagtcatagctcaccgtagcccgcaacaccccatgtcagccttccaagtgctgtgactagaggcacatgccgccatgcccatctcatttacaaattttttgttgtgttggagtcttgccatgttgcccaggttgatctggaactcctggcctcaagtagtccttctacctcggcttcccaaagtgctgggattatggaagtgagccaccatgtccaggcctgcttctctttcttatggtgatgtggaagtcatgatgtcgattgccgattcttcatacatcttccatccattatgtattttagtacccttcctgtatacagtggatctctgtatagagagcatgttcttgcagtttgcctccttcaaagttgagtgcaaactattggacttgactttatgattttcacccaatgtttcgtccaggcaccaagatacacttttactgttcctgatccattttagctgagcattttgatatatttttaaatcatgtctttcaaaatggtattattataaagaatatttttttttataggctcaaccatcaactcttatagttggatggaaatgattccaagagaggttcattatttcctcaggtcatgtggctgttggccacagattcttactagtatgttttccatatccggatattcagaccattcttctttacatttggggtagcatttacaaggttgtaaactctgagactgctgtttcctttctaactcatattctttcagtgaactttatgtgaacctcaagtttcttatttctggttactggtttttaagctctaaatacttggttgacatgatcaggagttgacagcttgcctcgttgcaaacacagagtcatatcaacagaaacccctttagctctgtcaattcctaaatgagagaaatatcacatcctctttcctccttttgctctacttaaatgacaggcccttgtttttaaccaaaaacatatcaagaactacaaatagaatcgtataaaaaataaaattctgcttgatatctctaaacaaaggtacagtattttgcttcaccattgtcataaagatactggttcataaatatcttttcctttttacactgatacagcaatattcatttagttaattatggtttttcaaaaattaggatatttgacaaatcatgatataacatgaactttttaaatgaggtgatttgccattaaaagtaccattgttttgctaatgaaagaatgagaaatacaaaggaaatctgaagtgagaagataaaggtaaagtattaaacagaatacagattctccaaaaaaaggaaaataatgagtatatctaatttttatgttatagtaagtctgaagtgataaataaatcaaattgatacattttacttacaaaactggtaccattgttttgaatacagatattattttaatagcatttaatgaaaaatatgattgcatttacacaagctaatttagaaagactatgcttaatcactgaaaggagaaacaatggttttaagtgtttttcagaccttgagtaatcttaatgatatagagtcccatagatctatcttgattttaatttaccaactgtgagaatgtatgacaaaaagcacatgctgcttgtgcatgctgccaatacttacaaatattttatataaaaattatgtttactataaatgtggggaagaatgctgattatctttgattaggactaaatgcatatattttaataataatgaatgtaggagaattgaacaggctttccttgtagctagcagatttttttcttacaagttattacatttattagtgaagtacattaaaaacatagggtgtgtcagtgttaaacttcagattcagttcaaagtgagctaatgtgctttgagtggcagcagttcttcaaaaactggaatcaactcttagtacaaaaaaagatgtcagtataattattctttggcctaattttggagctatgttatataacatgacaacagaatagcctcagtgtacttgcttccataattatgatttcttaatatttattgccattttggtattctcaaatacccagctcttttgtagaaattagctttttaataaagtcagaggagaaggtcagtaatctgtttcagtcagtgcagaatgttttgttggctttgttaaatgaaaattgatatctacttatctttccttgaaaggtcattgcctgaacttttagcttacagatttaggggttgttgctgatattttaatagtattgaggttcctacaacagtcagcattcatagttcaaaaaagttagtattgcaaaaggagagtaattaagaattctttcttaataaatgttattgcaagtcattagagtttcatgaaagcagagacatatggaaaaatctccccagagcaataacaaacatttcatatagacagtatgccattcaggtgttcagcatggaagacatcagaaatattaatagtccaagcaccctaaagtgacttcagactaaagtaaatgaatgctttgtttgatgttgagaataactatggtaggttttgctacaggaataactatggagtgttttctttatttctcctttaatgtttctttaatctacatttttattcacccttttttgttcacttatattttatacttttcattacagttttatactgagtgatgtatcagattaatgtgctcttttctagatttttcacctttacagatctctttattcttcccataatgagcaagcatttgccttaacaatattttaactgaaatggaaactaatatcttaagaagtaactttttaaaaaagcttaggtagaaatcattattgtaaaaatgttgtgattcattacaaatgtatcattatctccccagtttttcctgggcacgtgttggcttcttgcgtcttgattctagtgacatataaacacttttctgctttgtattgagcatgtaagactgtctgtcaagaaagctgccaaagaaatgagaatttaaattctgtgaatcatcagagtaatttataaatgcatcattaatttagtacctttaagcataatatgatccccagatttggtagccatgatctgagatggagtcttcactgagtaatttgccttgtttgggagtggggggtggtgaaggaaatatacatggtaagatttaggtgaattagaagtgaactaggcaaagataatttggtttatggtttatcctcttagtaaactgctttgaataattatgattttgggaggttccattacctctatctagagatacctctcatttcactgttcttttccatctccctggacatttttgtttcccttgctcatacctcctacccttaaaatttggatgtcattattgcacaataatacttgagttttgaggtactgtgggtcttaacagaagtttttttctttcttcatgtagtgaatttcctattcaaagatttacattgatttaaaaacttttagcagtcatatttacatattaactttcatctgtctttgagaagattgctgtttcttcttagattaataactgttgatatgtaaaccatttaaaccttccacaatttagtctattttgaaaaatttattacaacttttaaagtagtagaagaaatgtggaccattgtgaaagttacaaaatgtcaagttgaggttgagtatactggtgcaatacacctgtaaaattcaagatatctcattttatttacttttcttctccttcacatacctaggtacagaaggtttgggattcagcatcacttccagagatgtaacaataggtggctcagctccaatctatgtgaaaaacattctcccccggggggcggccattcaggatggccgacttaaggcaggagacagacttatagaggtaagtgacttccccagcaggatgttccctgattcttgaaatgttccatttccaggagccaacttttaaaaacattttcataaaatatgaaattcagttatatacattttagcggaagtatgcgtcacaaaatgtgtttctgttttatgtttagattttccatgttattttttatatatatttttttaattgttaaaatttttgtagaggcagagtcttgctatgttgccccagctggtcttgaattgctggcctcaggcgatcctcttgcctcccagtgtgctgggattacaggtgtgagccatcgtgcccagctcttttttccatgttatctgatgagaaattatctttccatttatttatttatttttttttatgagatggagtctcgctctgtcgcccaggctggagtgcagtggcacaatctcagcttactgcagcctccaccttctgggttcaagtgattctcctgcctcagcccccctggtagctgggactacaggcgtgcaccaccatgcctggctaatttttgtatttttcatagagacagggtttcaccacattggccaggctggccttgaactcctgccttggcctcccaaaatgctgggattacagacgttagccctcatgcccagccccatttagtttagttataaatttttagttactcagacatttggtttatgaggtaacattttgtcatataaaatgtctgtaaggttacgtttctaaatggctttatatttatgtctggcaatgtggaaatgtattcagaacagagacagatgaaataaatgaaaacagtgttccttgataagaggagcaaggaaatcttgaaatggcagcatggagaataaattgagtcataagagtcaaatgtcaggaaagaaaagaaaaatcgtttttgaattttttttctatgtcttatgagtttgggttcattggtatttgaagctgccttggaaatagattaacatacataatttgtgtttgtgtgatggtttgcacataaaagagaaaattgaaaaatatgttttaaaccatttttcttagttttttttaaagaaaatatagtctgtatttttattagcagatactgcatttcctaattaactagtattcaaatattaatgctaaggtaaacttttaccacactatccttttttcttatagtttcatatatggtttctatctctccagattgagttctcctaaagaatttttgtaaagtaggggaggagagggataccgtctgtatttttttccatgtctacatttggagcctagatcccttaaattttattcccactgttttggtcctgtgcatgtgacaacgtatgttaaataggcactgttagaagctaaataacagatgtttgagtacaaattatgttagggtcctgcttcctgaaaaagccacttgtcctggggttataaattgagtggtacgttagcccacgtctgcagtcgtagcttgttttatttgtaagagtctctgctgggacttgaattcagtcctcctgtcttctgagtccaaaaaaatatctgtccttttctggctctctccgtctttctttctaaagataattgctttattattgagtcacttttttcttttatcacataatcgctttactttcaacatatcagaaaaacctttttattttaaagcagtgagaaagacctgcaacctgcatgtctttcgagttaggctttatttccatagctgtcatctttgtcttaaaatggaaacttcatttttgcatgctttaagcccaaccttctagtatctacagttgtagctatacaatattgatacttacgtgcattttctctgagtgtctagataattagaatcatacaaagaaaaaaggatcaagtgacttaattgtctagattttttttcactttcttttgtttgagtacaaattatgtttagggttctgcttcctgaaaaggccgcttgtccttggggtataaattgagtggtatattagcccatgtgtgcagtcgtagcttgttttattttgtaagagtctccactggaacttgaattcagtccttctgtctgcaattccttaatagtagtaccttgaggtatatgaggttgatttttttcagaaggggaaatgttctgaaatatattttaactacaggaaaattttgatactgtaatttaagttataaacttatttgccttggacaaaatgtcttttttgtctaaaaagaaaaatgtagaataccttttaaaggaaacatatgctctcatttctgtggagtatatagtgctttctgataatgatgttatacttcctgttagataaaagattccctaagaacaagttgttttaaatttttttcctgcttgaattctctcataacattgaaaaaatttcagctgaaatattgcttccctgctaaaaaatattgttttgtagtttctttaatgtttaccttttagaggtaaagtgttttatttatatttatcagtaaaatttcatttaaagtgaaaatactgtaccaaaatatttttggtgtgtttttattaccctttataagagcaacacctttttattttggtgtaagaaaacctatgatgcacaaggctatcaaaatatctctgttctaagccagtaagttttgtgttaacttgacatttttgaaatatttattgcttggtacttgtcaatgccctggtgattgtcactttgggtttaatgatgaacactaaaagattgaccacttcctctcttctagatatctggtcttagtttctttattagtcacaaaaccttagtggttcccagatcatggcagaattgtgcatgaaatgagttatgttccatagcagatatggctagtcctagagtgtgtgtgtgtgtgtgtgtgtgtgtgtgtgtgtgtgtgtgttttcctgttgtttccacaggattacagctgaaaacttttgttttgttttaggtaaatggagtagatttagtgggcaaatcccaagaggaagttgtttcgctgttgagaagcaccaagatggaaggaactgtgagccttctggtctttcgccaggaagacgccttccacccaagggaactggtgtgtaaatttagagtagatgaaagatttctgatatgcagcagccaggggtctgggttagttgcctgatggcaaatgtttattgagacattttctgaggagtttctagatcttatatttctttcagccctcactgaatacaaacattcttttctctaatactcccttagtttcagaaatggatatcctcagtaatgaatggaggggtacttaaacatcagactgtagggatattttcaagggcatcaaatgttcatcactgtacaccctcagatggactgactgaatacagagacgccgattatttcagaactgtcactccacagactgtcgctgaaagcttgccatcttccacactgcatatgacaaattttcatatttcacattttcatagtacatgtcagtaagccaaatagatgcttgcttccttactgttgtatgaaaaggaatacctttttaaaaaaattattattaaaaataaaaagacctaagtggcaataagcctcatggctattaattatacaaatataggtcatgttacttaggatgacataaatgaaggaaatgaaaaggcatttacaacttttgcaacctatctccttcactttccatacatacattaatacatctgagtatttacatggtattggtgtgaatgaaataagtgtcttaaatgtacatagttctgagtggttttctgcaaaagtgctaggtttcatttatatataaaaatgacataattggaggagttgcctttgtcttttgatgtggtaagaaaattgttttatttcaagtacaagtggtattttaaatatttcaaaacagattctacttggatcattttggaatacatccttttcatctagctcttagtgctaaacaaaaattaatttgtataatctagagtgacaaggttttagaaacgaggtttccaaatttatcatatagcccaaattctcttgtgtcttcaagtatggatgtgttatgataaaaataactatattttattctctatataaactatttctataaatattataaatgaaaaaattttagtcataatatcttatcccctggttacacacaggtcttaaaacttaatgtggattttgtggaaatttcagacagtgatagggttgaaaagtgaacacttttgttttaagtagattttgaataaattatgaaaacttctttatatttaaaaatgtttaatgcattatttctcaatttaaattcagtttttcgttttccccccactgttatccaattttgtgcttaaaatgccacctgatcctaaatctggagatgtctctattaaattgtaaatgagcacttaaaaaaaaaaaacaactagctttccatgtgatttgccgaagctttaattcttcctcagtgtctcggagtgcactagttagcattattagattgccaaagcttagacactgctcttaagcagccttttccagagttagtgccagcatatagccagcttaaggttattcaggttcttcttgtccaattttgatcttccaggcttctgtttttcccttctgctacctactttttttttttcttggttatgtaatttattgcttgtgagcttttcattaaggagtacgccagtaggccgtcagtctattatgcatgttgcagctgcttctcaaaatttaagagaataaaatcctgaaaatttaaagggaggggacatttaaaaataatcttgaatccagtagacgtaactattttcctctgtttggggtgtctgtgtttaaattctgtgtgtctaaatctaaatacttttatcaatcggtgcctttttttaataaatcatccttgtaagttcctaggtaattaaggcaaatcaacattataggaaaaaaaaatcatgtttatttcctgtgcaacattttaaagtataaagctgtggttcagactgtggttcaaactgttattatctggtctagttatcaaatgattctataccttaaaactttgatttgattgggaaaattttaaagcaaaattagaaacagtgccatgattaggaaagcagtttggtgagacttgttttcctccagataataaattcatgatgtactgtgaatgagcaagtaaaaatgtatatctagaaaaatttcttaaaacacacacataaacacacacatcagcaaaattttggaagacagagcattatgtcagccatcatataattaccctttatatattttgtggattttaagaatcaacaaaattttctttaaaataaatcattgtgtccctgtgtgttgaagatggctttggtcagtctgtatttatgtttttcttcaattcttctagaatgcagagccaagccagatgcagattccaaaagaaacggtaagagctttgtcttttgaaggatgcagagatgttggaaagatacatggaactaacttcttactaatttaatacgaagttacttgtcctgccttttcctggctcgtaatatttaatacatgggtttattaaatgccaaagtggtcttattttaaggtgacttactgttaccaccccaaatggagtatattttgtgattaattttggtcagatagacgcaaaaaagagagagacttcctattcacttgcaaagtgaggaccaaagcttagttgtttggcatatatgcaaagtatttcatgagttgtgaaatgctaaattataagtggccacaaaatggaaagaaaagttaaaaaacttgattcaatcatggaaaaaaagggagggctaagagaatacagtaaaaaaagtatacacaggaaaattaaagtgacgtgtcagtattaggctaagcatagttgttagaataactataaaagagataatttaacaaaagttaaggactcacagctcacattaaaatgcaaacatagttgcatcctgttaagaaaacaagtcctgagacagactggggataaaagagtaagcttagttccagcaggcagaactaacacaataaaaggaaggattgctctatcagtctctgtgatgatgcgctatatgggagtaaaaagggcattttatattgacatggtagaaattctaacaatcaggatcttttttcctttttacatcaaacaacatagcacaaaaacattcattctcaaactatcgtaaatggaaaatttagcaaagtcatttccatagtaggtaatgtcaatatgtccctttccaaaaatttttacattgttgactaaagaaaaaatataatgaatttaaataacataataaacaggtttcattttctgtacagctttataaacaggcaactttgaactaatgttatttttcaaatattccttcgttgttttttttttttttttttttttttttttttttttttttttttttttgagtctagaatctcaccatatttcatggctcactgcagccttgacctcctgagctcaagtgatcctcctataaatattccacaattctaaaaacaggtgacaaattacatcttggaggaaaatcagtaaacaaccttgagaatattccacattaataagtgtgtgttgtagacaattcctagctttaatttttggcttataaaataaatagggcaattatatctaatcaaaatcacactgatatttatgtgttggggtaggttagataaggggaaattggacaaattgattctaaataataaaatggggtacaatagcaatttatactactctttgaaaagacaataattgtggcagagtatatataatataaagctacaatacctaaaacagcatggcattgttatagggttaaacaaatagatcatttaaacagattaagggttacagaaactgacatgatgtgcataggtatgtgcatgtgtgttaaagatggcacttcaaattagtagctttaaaaggatagtttacgtagtgtttataacaattgcccatttatttagaaaagttagctttttctcaccatatctcaaaataaatggaaaagatctataaaacaaaatagatccacagtcatttacacacacacacacacacacacacacacacacacacacaccccatttgtatctgtaccatgaaatagttatagaataaatgcaaaaggaggaagtatttacaatgtgatccttaggggaagagctattcctttatggtttaggataagtatcatagaatattttggaaaactcaatgactttgcacacaaactccatctattaatgtctgagacaatctgagatggaaaatgatgctttaagtagtaaagatagggatgttctttcgaaacatgtagtcagggccaggtgcagtggctcacacctgtaatcctagcactttgggaggatcacttgagcccaggagattaagaccagtctgggcaacacagcgagacctcatctctaccaaaaagttaaaaataaacaacaataaaaaacatgtagtcagtcgtgttgaggaaactgatgatcggctgtgaattcctcagtcaccagagggaaagaagcatcttttgatgtggtattctgttaagaaatgcaagctgcatttcagttcacaacctgtgtgtttatggtagcatgacatggtgactgggagtcaccttaaaaaaggaagtcatatatacttttacatgtgtctgacttctagttacgcttggacttttttttctaatacgagtttcccaaacaaagttaaaagtatagtttagtttgaaatattatttgtttcttaattttttatgcgtgctctcacatctgtgcctctctttgtgctccaggtatgcggtatcattttgagttgtaaaaggcttaatattaacatgataatttaagaaattgacaggggcacagtctctgcctttctaccttttgatggccaaggatctgttttaggctttttgaatattgctagttcttggcacatagtattgctcaaggaaaactccgtgataggcttttgctctttttattagtgtttcttaatgacttgttttaggttctaggtctgtgaaatctttgattatctattttgtcaatgcctagaaatggggaggaggggagcactaatgatttcaccacaaatccaagtccaatgctcactttcattttgggctttctcagggttgattttggagcaaaccatggtatatcaactttaaaccacaggaatggtaactgtgcatacagttatgattctttttcttttcctgcaggagatatattacttctgtcaggaactatatgtgatttatacaggcttacaaaaaatagaagacagtttctttcacctctaatgcttaacattgcttataacgttgcagtcctatctatgactggcatttattcatcagttattgtgtgaaactctttatgtggattatcttatttaatctttacaatgtccatgacttagttcaggcacgtccaatatcttggcttccctgggccacactggaagaagaattgtcttgggccacacataaaatacactaacactaacgatagcagataagccaataaataaataaataaataaataaataaataaacaaataaataaataaatcacaaaaatctcataatgttttcagaaagcttaggtaggaatttgtgttgggccacattcaaagccatcctggaccacatgcggcccacagatctcaggttggacaagcttgacttagttggtgatattatcctattgaaaggggaggaacaaagaattaaccttaggacactccaaatcttggagccagccataaactcaggttgtctgacaccagaatctgcagggcagattttatttctccttaatgtgacttagtatgttgaggggggaaaaaaaaaagctaagctacatatatagtttcaggtaatacagtatgagttccatgttggaggctgataaactatgactgaattttttttaaataaacaagtaataaagaaatccagggttagatgccatctcattagtcaagatagtgggaagagatcttgttgattttttttttttttttttttttacattgctcatggattgatacataggctttcctagaacacgcgtttagtaccattgatttccattaactactgcatggacacttctgtcctttcccagcccagtgaccagttttgcaaatactttctcctgacttgggctgctcccaccttcttctttttttttgtttgagatggagtctcgctctgtcttccaggctggagtgcaatggtgcgatcttggctcactgcaagctccaccccccgggttcacactattctcctgcctcagcctcctgagtagctgggactacaggtgcccgccaccatgcctggctaattttttgtatttttagtagagacagggtttcaccgtgttagccaggatggtctcaatctcctgacctcatgatccacctgcctcggcctcccaaagtgctggaattacacgcgtgagccaccgcgcccggcctgctctcaccttctttgcctgtccatacggacgccaacttctaatcctactgacttctacctatctcatgaggcttaccctaaccggaactagtgttctctcccattttgtagttctttatcatatttgtctttgttcgtttttatttgtagaatgcatttgtcttgctttattaacaaagttcactgatgtcggctcactggagcctccgcctcctgggttcaagcgattctttttctcagccttttgagtagttgcaattacaggcatgcgccaccaagcctggctaattgtttgtatttttagtagaacggggtttcgccatgttggccaggctggtctcgagctgaccttcagcaatccacccaccatggccttccaaagtgctgagactacaggtttgagccactgcgcccagccacatgcttaactttcaagaattcaaaatgcattctagaaagttagtgggctttccctacagaaaccacagggatacattggggattctttaggaacttttttgaaggtcagaagccatcttgataggctaacttcagaaaggttagagtctcaagttagaaatttaatgagctagaaattaagcatgggccttattaggtttattttgctaacacttaatagatcaagtgtaggctgccatattgtttgtgtgtgtgtatgtgtgtgtgtgaccaagtctcactctgttgcccaggctggagtgcagtggctcgatctcggctcactgcaaccttctcgcccaggctcaagcaattctcctgccttagcctcccgagtagctgggattacaggcacgtgccaacacacacagctaatttttgtatttttagtagagacggggtttcaccatgttggccaggatggtcttgatctcttgacctcgtgatctgcccgcctctgcctcccaaagtgccgggattacaggcgtgagccactgcgcctggccagaaggaggacattttcttatataactgtgttatagttacgaaaatgattaaatcgattgtattatcagttgtcccaattaatgttctttatatcataaatgaatgagagaatgaatgaaatacaagtatgaatagaatttggtcctgtttccaattcaggatcatgtatggcagtaagttctcatggctctttaatctcctttaacctattacgtttgttaatattttctcaagaacaaattactccaggcaaatttttaatttttgaaggggcagattactttgagaatgtccctcaatttgagtttgtctgatgtttctttgattgggtgagtattttgggagttaacattagagattaataattgtgcaaaacattttttcctcagcattattttaccaagcaaaaaatttaaaagtctttcaaaatgtatttggcatctaccattcgaattagaaaaggcattataaagccagatatgacatttgaactttactgataagaataatgaactttataatatcaacacaaataacatacagaaatgttcatctcacatacgggataaattaaaatggggaacttaaggaaattttggagtctctttggagggttattcttttattaagaggtttatcatggttcttaaatttaagaaaaatttaagaaaaattttaaaaccatgataatttctccatttaaaaaatctttctcttagttaaaaatataaatggttgttcatattgtctcagatacctacctgcatattatttaatctctgtttgttgaataagtatattctctctttaatgtctatgaaaatttctattctgcgtgacgctatgatggtctgctgtcatggcatggttttttttagagctgtcctaaggtgctcattcatagcccatctttgtcccaagcaacagcccctgcccatcatatccaggtgcccctcaatttatgatggggttacttccccataaatttgtcagtaaacccactctatgttgaaaatattgttatgatgaaaatgcatttatacacctaacctacaacgctgtaacccagcctaccctacctcatgtgctcagaaggtttaccttagccttcagttgggcaaaataattaacacaaagttattttacaataaagtgttgaatatcttatctaatttatgggataccgtactgaaagtgaacaacagaatggtttcatgggcaccatcaaaagtggaaaaatcattaagtcgaaacattgtaagttgtggaccatctgtataaccctctatcaatttctcctcccccatgcagtgtttttttgaggaagcagaattaaagaagtggtatacaatggattttttgtattgtaaaaataatgcatatcaactgtagaaaattcagtcatgtgtagaagaaaattaaaatcacttgtaattctgtgacttcagtatcatcattttaatgtattttttcatatatatatttgtgtctgtgagcctagccaaagataatgtatttttttaaatgattttcttgttctggcttggtggctcatgcctgtcatcccagcactttgggaggccaaggtgggcgggtcacctgaggtcaggagtttcagaccagcctgaccaacatggcgaaaccctgtctctactaaaaacataaaaattagccaggtgtagtggctcacgcctttagtcccaactgcttgggaggctgaggcaggacaattgcttgaacccaggaagcgagattgcagtgagttgagatcataccactgcacttcagcctgggcaacagagcgagactccatctcagaaaaaataaataagtaaaaagatgttcttgtctacctatttaactaatatgtatcatgtcccagccacatatcctattattgttaataaatgtcatgccccaggcacgagtgaagactgacataaattcctaccttgtgaagcttctagtgatctttgaaggcagacattaattcataaaaatatgttatggaggtttttgatgggtgtactggaagttatggaagtccaaagggtaaaactcaatttcttagtcacaaatactttcttgtcttacatattattttgctaagacactttattagctgaatggcattccattgtgtagatagatcttaattttcctgactttcatacatgtcaatttttagctattgtaattaaaacaatatcctcacagttaaaacttggtacatgatcacaactatttttgtaggccatatcactaaaagtaatatttctagcttaagaaaatggcaaactgtagaaggtttaggtaagcattgtcaaattggtttccataaatattgtaccatttttttacattcaccagcagtgcaagaacatgcgcatttcaccacaccagtattaaatatcattatttttatttattttttagtgttctatggcaaagcagtatttgttggatatcattaatttgaagaaaatatatggagcaatttgataacctttgattgatttgcgagtaagattgaaccttgtacttggaggttgatttattggtttgctcatctttctttagtgaatggcttgtttacatccttttcctgtttgatgcagactgcttatctttttgttattaatttactagggatttttgcattaatttactagctatttgctaataactcagctgggcatggtggctcttgcctataatcccagcatattgggaggccaaggtgggaggattgcttgagcccaggagtttgagaccagcatgggcaacatatcaagaccctgtctctacaaaaaagagaaaaagttagtcaggcttggtggtgtgcctggggtcccagctagctacttgggaggctgagggcgggataatcacttgagtccaggagttcaaggttatggagagctatgatcatgccactgcactccagcctggatgacagagcaagaccctgtctttaaaaaaaaaaaagataattctgtagataagggcagatcttgagagagagaaattaatgatttatagtggagtgatgaaacttttgctgagtcacgtattttgttacaaagccaaaaatcggctattgagctcactcctataattttatggtcttctatcatttgtgcacattccatgtttcttttgcctctcttcacaatattttgtacattctcatccaaattttcgtttgttgcggctcagagattacccttcccatgattgtttttctgctgcttgacacaatcaactcttatttccttttttatagataacacctttgctgcagattaactgtggatttgggcctataggccagctctattctcagttttttggactgtgatttcgggaagaaggaaaagggggccatgatggtgcccacttgtgactctttgtctcactgcagatagaaatgtacatcttttctgctgttctctggagggtgggatagtaagtagctttcacaatacccattcagcaggttccttagcaaaggtgcccttttattctgggcatttaaagacaacaaatggtaatggagaaatgggcaaaggaagaactgacaggctttgttgctgaaaacaatcacttgaggtatacacacatgtatgtgcgtgaggcaggtgtgcttgagtgacatgactgtgcccagatgacatgaggagtgagttaaagaaaagacattttttgcgtttctgtagaaagatcttaattcgagaaacagttgataaggtgcagaatttggatggaatagcaaggtgatagaaagttagtttctattttacatcagaatatggagattcctatactatctgactttatgaacattctcagtaatatagcatttcaaatgatttttgaagagcacaatttttaaaaaacatttttctgccagagaactaagttctaaaagctggcattaatttctgtctatgtcaaaagccaaatggattaatagtggaatatcacatgaaacatacaatgtttcacatcagtgttcttaatgataataatgacttaagacttggtaagaaagctgaaaaagattattcccattctgcagttgttataataaataaactatcccctggagaatatgctcttctttaaaacaggttcagagttcagcaatcagaaaatattgcaacttgattaaaatttttcttcatatatgcagccagctccttatcctgatctttcaagtaggaaaaatatgagaattgtaagccttggtaaaatgttatggaaatgtaaaactcagtaaacactgaaaaggcaactgaagattcaaatcagaaagtaacaattaagaaccttccagagttgaagcaagtaagcatagtgagtgatgagacttaggtgtgtccatagaaagaatattcttgttttccattttttcaaatgtagcttttccatgcttataagtactgattgacagaataattttttatttcagcaacctccaaatttaaagtcaaggggaactatgatgtgtattgatgttgttttgtattttaaacatcaaaatttaccgtactttatattcttgtaacagattttatattgaggtagtgcagttcattcacacatagtcattatttcgtactctgtaaatgtttcaaggggctgggcacgtaagcccaatactttgggaagccaaagtgcgtggattgcttgagcccaggagtctgaaaccagcctggccaacatggtgaaaccccatctctaaagaaatacaaaaatttgcccggtttgttgacatgttcctgtagtcccagctactctggaggctgcagtgggaggatcacctgagcctggggaggtcaaaggtgtagtgagtagtgattgtaccaccgcattccaccttgggtgacagagtgagactgtctcaaaaaaacaaacaacaaaaacacttgttttgagctacatggaccaaaataaaaagtatattgaatattcatgtttatagagcaaagcatgtatataaagatacttttgtatcaaagtatttgatatatttgatctttttttgcccacaatacattggttttatttgagctaaaattgttctctgggaatattttattttattttattttttgttatgggacagagtcttgctctgtcgcccaggctggagtgcagtggcatggtctccactcactgcaaggtccacctcctaggttcacgccattctcctgcctcagcctcccaagtagctgggactacaggtgcccgccaccacgcctggctaattttttgtatttttagtagagatggggtttcaccatgttagctaggatggtctcgatctcctgacctcgtgatccacctgcttcgacctcgtgatccacctgcgtcggcctcccaaagtgctgggattatgggcgtgagccaccacgcccagcctgggaatattttaaatctagtttttatgatgagcaggcttaaggctttatttggactttgatcataaatgtatttactttgcatagttaacatgactattactctgtattttttcagattcttattttgagttcttcattatataagttttaattttttttttaacccattagcaagtttattgtaattgaagtgttacttgtctttaaaaactatcaggccatcctttgagatagcacaaagatgtcctaccataaaatgttaactttacatatttgtaaattagaaacatcacattactatgggtctaaagatttataaatagcatattgcttattttatgatgatctaaaaaattcacttacagatagtgtactctcaaaatgtattttatctaattgagacatctgagattgcatgtttatgccccaaattccttgcattccaaatttccttgaattccaaattccttgggttgatttttattcttattaggacattttaaaaatttggtaggatgcagtcacctactttttttgtgttattgaacattctgtaaaagcacaatctgtttaaagtatatattcctacatatctgtgtaccactgtatttcttattcttcaattataatttgataagtcaagcttgaatgactaaacagatgctggagaaatatttcaaacgtgggaaaagaggaggagaaataggttgtaggactagatgtgccattcagtttttacttgaagagcctgtgccacgtgtctgttatgtggttggagcaagagtttgtgcttgaacaagcatcctagccttactgatttggacatgaccagtatagagatggtggaaatcttggtcatgggcgggattgctgaggaggaggagctcagaaggctgagtgcttcctcttctggagtgtaggctttcttaatgataggctgtcatcttaatgcattttattcagttctacattaagctttcatttcttcctctgttttaagggaggtgaacaataatttgtatatcctaaatgttttttattttaaaaagtcttccttctatgcttggtgactatgaagttaaatcttaactaattaaacaagattacctgaataatatttaccagctatattatgtatgctacaatattgtggaaaagttttctgtgatgttgtatatctctactttgtctcacagatgttgatgttagaattctttagaggctctctgaacccatatacctttttctgctgattttgtatgatcaggatttgttattttttgtgaataaacaccattagtgaacattaaatatattgataacttcagaatttcctcataaaaagggagataaatgaattatatttatttatttttactcccattgttactgtttttcttgtcgtttagaatatatgattacaccaaaaaaatcccgaactctagaaatctactagtctttagtccttccactacattttccctctatctttctcaaatctgatttaagtttggttcaatattgaataattgctacataaaaatattaacagctggttccaagaatcttctggagtgggtgcagatgtagtgttttcatggatcttgctgtggaaccttcatggaaatattttgcctcttatgattaaggaactgctcattagcagtctttaaaaataactttgagaaagaaacattggactataatgtgctgtgcaattttgttccctattagaaagcagaagatgaggatattgttcttacacctgatggcaccagggaatttctgacatttgaagtcccacttaatgattcaggatctgcaggccttggtgtcagtgtcaaaggtaaccggtcaaaagagaaccacgcagatttgggaatctttgtcaagtccattattaatggaggagcagcatctaaagtgagtgtcaactttatcatgcgtatgcctattaacaaaaattttaatttcaaccctgttcctattttggaaacatatacagttaacagaagttttctcatttctttatggtacccacattcacatttaaacaactaggtgtatcagtgatgtgtcacgtggggatggagtccataacttcaacctttcattttttctctcacagaacatacaacccattgacatgctagttaaatgaagttaatcaatgcaaagacttggcataggtcctgtcacagaatgggcgtatagtagacgttaatctttcccctcccctcccctgtttgtgggtcacttactctatttctcagcctagagaaaatttcctggccatttgttaaggggacagttctctgcaactgtctaatagccttgagcttttacatgtcttggtttctaaataacctctatgggtgtttctggaagcaagaaagtaatcactttgtgtcctttgaattagtatgctattttggtaaacagattatgataatgacttgatttacaaatgtataaatgattgaaatagacacaggctacaatagctgcttagacgttattatgccagcgttcaattgggcataatccattaggattaaagctccccactttttttttttttgctttgtttttattttatttattaactaaaggaaaagctacttcttttatagcagtctgtttaatagcacttatttttacctgttttcttcccaggatggaaggcttcgggtgaatgatcaactgatagcagtaaatggagaatccctgttgggcaagacaaaccaagatgccatggaaaccctaagaaggtctatgtctactgaaggcaataaacgaggaatgatccagcttattgttgcaaggagaataagcaagtgcaatgaggtaagaaatgcaaaaaagtgctagtatctaaaattgtaaataaactacatttctgtcctaattttgggcaaagggtattaggttccaggaccttacatcaaaagaccataaattatctttgcttattgtagttttattattttgtaggtggattgtggtttgtgttcttaattcttgtgatcaacatattcctaagtggacattaatactcctattgccaactcagcaggaaacactgggatctcaaaagcccctttagctgaattttttcttgaaatcagggtcacatcttccttctcagagccaacagtttctcttctagttggcagagttatacctgggaggtgaatcatgcagagaaacagttgcttattcatttatttaaaatgggatgcctcttacaaagcccctagtagggaacagtctttccttccctgtcctttcttttttatttgagacaggatctcactgtgttgaccatgctggagttcagtgttgtggtcacagctcgctgcagcctccatcttctgggctcaagggattctcctgcctcagtctgccaaagtcctgggattacaggcacgcgccatagcacctggcccacagtctggctttcttagatgatggtgttctcttgtgagattatcaatagcatatacctccctctctttcctcagtccccattttctctttctctatgggattgagtctgttctcttagaatgcctcctttttcagtgatctgtattgtattatactctgcttgttctaaatgtatgttgcagtttggaattaggggtgaggaggacacagggcatcctctcttgaaaggtaggatcatctattttcccaaatatggaaaaacatactttgttgtataataggacatttgaaagttaaaaataaattatatgttgccttgataatattggagcttgaaaaaagctaaatttcatggatccattataaattatgtgccaactgtagaaaataggtcagacttgcccatgtgcaaaatgagctgttgaaaatgtgaagtttttcttaaatcaatgttcagattcccacattttaagatcaaatcaactaagataaaatgattagcaaataatacaaactgaaaattatacctaagttgtttaagagtttttcttaatttttaaacttctgtttaataaacacataaagcaccgttttcaggttgcagtgaccactcatctgaacctatgatacaagcatattttacagagaaaatatactctcgagctcagttggtagtcaatatagaggtgacgtattctgaaagatcactgaccactgaattattttgttgtttttatttgccaaatgtagaatgagttaacagtaatcaacaaattaattgcgatatcaagagaacaacataaccttaactaaaaaatctcagagtggagaagagtgggacatacaaacattcatttatgtaagataaatataaaagctaatccctcacagtaggatgctggactgatatttttttctcttttccgtccctcctggactgattgaatagtagtttttactcattgcaaaatcattagctgatcttttaacttaagtcccacaaagcactatatgaaaacatctcaactgtaagtttacaaaacatatcattctcttttaggcctttttattttggccacctgaatactttcccattacacaggacagttttcattccacagatatttattgagcatcttatgtgtatcagaaaatgtgttagatcctgaggacatagcagtgaataagacagatggcatgcattctactggacaacgtatcaccttagtcttttagagaccaattaaaatttttaacaccttctcaatgttttccttcacagaaaacattgaatgctacaggaggacttaaaatgcagaaatgaactgaagatcagtgttctgcttttatctgattcagattattccctattgttccccccaaatagtgacaaagtaaacctgtacctgcctgaaaatgttttgataaaagcactgattttattccctgtaagagatgtgaaattggaatccccctgaaatatctctgtgttttattcacttctccatatgaatttttgtgaatgaatatgatttaagtaaggaaacagctgcagtagacagtaatagactttaatattcaatattccttatggtatcattttcatacattgctggttattactatttcttaggacagcataagcttataaagcaattatatcaaaaaatcttatgagtgctgtgctatctttgtaatactagcaagaacccttttgtactgatagggtttaactaaagaattacatgaagacagaagatctcaattcagcttccagtaaggtataagacatgatttttcagctgttgtacttatgcattaccttaggaaaaccttctcctttgcacactgggagggtatgtgtaaattatgttatagtaaatattgatataagcacagggcatcctgctgtcctgaacaaatctcaagccaaaataatgtgctgagttttctttctaggtcttttaatcagctgtatagtccagtctttgccaatcagaaaactgtattttgctatctcatctttaaatccaaggtttgcatatttaatttctagttagggaaggtaagaatgtgtaaaagaaaatcttttgttctttgtcacatttttctttctcttatacatggaagtgctgtgtattatcttaatatgtcttctttatttttcatttttgtagagacacggtcttgctatgttgtccaggctgttctccaactcctggcctcagcttgccaaagtgctgagatttcaggcatgagccacctcacctggtccaatgtgttttctttaaatttatttgtcagctcccttcactaggtattatgttaaagccctgtatttccctaacattagtcgcgacagggcacattggagacattctctgggagctatttcttagcctattttgcttagccttccaggaatctgcaggcactatgtcattctcaaagtgtctcctatgtactctctctagttttctgctaccctactccgggtcttctctaagggttcctcttttctgcctgttctttcattattcctgtctctcaaagttcctctgggtctgttgtctgtttttttgtttggttttgttttgttttttttttttttttttttttgagacggagtgtcactctgttgcctaggctggagtgcagtggcgtgatcttggctcactgcaacctccgcctcccgggttcaagtgattctccagcctcagcctcgtgagtagctgagattacaggtgtgcgccatgcccagctaattttttgtatttttggtagagatggggtttcaccatgttggtcaggctggtctcaaactcctgaccttgtgatctgcccacattggcctcccaaagtgctggaattacaggcgtgagccactgcgccccaccaggtctgtttgtttttactctgctcttgctccctagctgatctccactcccttgctgcctgaaaccacttgttaggatgaatactatcatcctctttccagctcacaggtccactctggcaccagatccctctgtccacctgcctagggaaatatttcctggtatgtcttatgggcacctaattcacaaggcaccacattctttctgttgtagaaggcagagatctggggtcacccttgacctctcaaatgctgtccctatccctgttgcctgttgcttctacctctagaatttccctcttttcttttttggagacagcgtcttgctctctcgctctgttgcctaggctagagtgcagtggtatagtccccggctcactgtagcctcgacttcccatgctcaagcaatcctgccacctgtctccctagtagctgggaccacaggcatgcaccaccacacccaactaatttttctttaaagatgggatctcactatgttgcccaggttggttttaaactcctgggctcaagtaatcctttggcctcagcttcctaaagtgctggaattacgcctgtgagccactgcgcctggcctagaatctctcttcctttagccgctcccctctttcccctctcccactgcctgagttcagacctcatcctctcaccaggcgcactgctgcagctccctgagggttttctctgcaatcaggctttctccctcaatccattctctgcactgcagtcaggcaaatttttctacagaacacattaatcacgtcagtccctgctgaaatcccttcagaggctttccatgtctccaggatcaaccagtctccatcatggggaccactgggacatgcctgattgtcatcggtgccctacagcccctgcagcacctctgctctagccactcagtgtttctggtaatttctcagacatgggatgctcttttacacctctaggtcttccacttgagtctatctgcccctcatcctagcaaagacttaacgcagtctttcattttccattttctcttccaaaggattttcatagccccgtgtactccccttcacccagcagctgtcacactatcatggtttcctctttgattttcttttgctggaatgtggattctgagactgccagggcttggtccatctaccactttcctgtgtatcctttgctggtatccaacccaggcctgacacatcagcacaggctgaatgacgaagagcaaccctggagagtctggcttttttttttttttgagacagagtctcgctgtgttgctcaggctggagtgcagtggcgtgatctcagctcactgcaagctccgcctcccgggttcacgccattctcctgcctcagcctcccaagtagctgggactacaggtgcccaccaccacgcccagctaattttttgtattttttagtagagatggagtttcaccgtgttagccagggactgcaagtgcctgctaccatctggcgttttttttttgttttttttttttgaagaaagacaggtcttgttagtattagaaactgaaattccagagtcaccctcagacaaggcaaacaaagtgattttgagggcagtaatttttatttcctttgctttccttcttttcttagatctaatggttttatctaactacacttaaaaacattgtataaaccatcattgtttgttttcttttttctttcttcaaagaaaaagagatggcttcccattgtttaaagcccttaaaggatgatttcacttttttagagaaaaactgagtccctgcattcttttccatcgtttcagttttggaatacacaaagtaagaagagaaaaattgttttcacttacctcaaaggacacatttgttgaagacttttattttttattttatttatttatttatttatttttttatttatttatttattgatcattcttgggtgtttctcggagagggggatttggcagggtcataggacaatagtggatggaaggtcagcagataaacatgtgaacaagggtctctggttttcctaggcagaggaccctgcggccttccgcagtgtttgtgtccctgggtacttgagattagggagtggtgatgacttttaaagagcttgctgccttcaagcctctgtttaacaaagcacatcttgcaccgcccttaatccatttaaccctgagtggacacagcacatgtttcagagagcacggggttgggggtaaggttatagattaacagcatcccaaggcagaagaatttttcttggtacagaacaaaatggagtctcctatgtctacttctttctacacagacacagtaaaaatctgatctctctttcttttccccacatttcccccttttctactcgacaaaactgctatcgtcatcatggcccgttctcaatgagctgttgggtccacctcccggacggggtggcgcccaggcagacgcgccccccacctccctcccggacggggcggctggccgggcgggggctgccccccacttcccagacggggcggctgctgggcggaggggctcctcacttcccagacagggcagctgcggggcggaggggctcctcacttctcagacggggcggccgggcagagacgctcctcacctcccagacggggtggcggtccggcagagacactcctcacatcccagatggggcggcggggcagaggcgctccccacatctcagacgatgggcggccgggcagagacgctcctcacttcctagatgggatggcggctgggaagaggcgctcctcacttcccagactgggcagccgggcagaggggctcgtcacatcccagacgatgggcgaccaggcagagaggctcctcacttcccagatggggtcgcggccgggcagaggctgcaatctcggcactttgggaggccaaggcaggcggctgcgaggtggagattgtagcgagctgagatcacgccactgcactccagcctgggcaagattgagcactgagtgagcgagactccgtctgcaatcccggcacctcgggaggcccaggtgggcagatcactcgcggtcaggagctggagaccagccccgccaacatggcgaaaccctgtctccaccaaaaaatacaaaaaccagtcaggcgtggcggcgcgtgcctgcaatcccaggcactctgcaggctgaggcaggagaatcaggcagggaggttgcagtgagccgagatggcagcagtacagtccagcctcggctcggcatcagagggagaccatggaaagtggagggagaggggagaggggagaggggagcaaaaaagagtaactttacagtggagaaagctgttgacactctgttgaagatttttaaacgagactggagtggaatggaagtaaatgccaggcatcattccttgagtgttgaaaatagcctctatatgagaattatgctgagttttaaatattttaaagacattaatatttgtagaaattactgtaatttaacatagcttccaggcattttattatatccatgttagaagtgattttatgtaaagctttttcttagtgccagtagagaatatcgccaggtgagctttctgtcttagacctcatattgggggatttagtcatcaaggacttctttaaaatgaattttttctctaggcttaaccctcttagaatgagaaaggtatattagaataggaaaggggcctaaggtatcatttatgaatctcttcattttctgtattaagaaataaatgcaaagaggtcaaatgatttgctttaatggctgcaaggccaacataggtggcaaagtaatttagaagcaaaatgtctgtttctcttacacaagtgagtggatctaattgactgtgattgtgttgttcaggcactttatatcccagttgcgttgggaagtagtgtacaataaaagcatgggctttcgaatctgatgtaatcggagaaattctggttctgccatgtgctgacttgaggagctcacctcacatttctggttcttgccattgccctcatggggatgtgaaggaaaataaatgtggtcctgtttgaaaagagaatgtgaaactgtgctctaaatcttccttcactctcctccaaaactaaaatctgtgttttcattagttgctttatgttcacctgtcctctggaagctaatattttccagaatgtatatttgtaatctaggttaaatgtcttttaatatcaacatcatggcgtgtcctcagttttaacagcctatttccacataatgtagtgtgttttaaggaaattatgactcactcacttttaggaatgaatttactaatctaattattccaccagtgcctgctctacgctaggcattggggataaaatacaatatgctaaaaaaaaactgaaatattgaataatatgatcttgccaatcaccagtgagaatccagttttaggtttgttgaagggggtttaaggccattccaatacgaacttttcagtgtttgtagtggagatagtgggatacattttctttaggtgaaagacactatttggcttgctaatgcatactcacaacaaacggagattttattaaaccccacagataaattcacatgaattttcattattcacttagcttattatttcctttgggatagtgaccacaacatgaaataaaggcctgttcaaagagttaaaaataagatttttttttgccctgtggtaatatatttccaagttactgtagcaaaagactgtatcactttacactcctaccgagtgtgggttatcttgccgcaacctaaagctatttttgttctttaataggtagaaagactttccttgggatggaactgaggggctaaacagccactgctacaggggactgtatttagttggagtcaagaaaatttttgcacattaaaccacaaatagacaacaaaatgaaaatcgcagttgtgcttactttggtttcttcttctaatgaagcttaattctaccaccccccctccccccccgccaagatggagtctctctgttagccaggctggagtgcagtggcgtgatctcggctcactgcaacctctgcctcctgggttcaagcaattctctgcctcagcctcccgagtagctggaattacaggtgcccgccaccacacctggctaatttttgtatttttagtatatttggtgtttcaccatgttggtcttgaactcctgacctcatgatccacccgcctcggccttccaaagtgctgggattacaggcgtgagccactgtgcccaaccgaagcttaattttaataaggttttaatataaggagcctgcaagggggtgatagcaggcctgggggagcagaggccagccattctcccaggaccactggggttgcctctcttcctcagtgccgctggtgccccctctgacacatttctatttcctaagctggtgttcttgcaacaacaaaaaatcatcaaaagatttaaaacaaaactgtaaccccaatcagtttttttaaaagaaattaaaagccattgtatcttctgttaaatatttatgtagtcaactattgatgtcttcatttaaatctgtcttttgagatgcaaattaaatatgggtagagaggtaggggaggtggagaatctttcctatgaaaatgttcaagtgcttggtttttttctgaacagacgtcttactgtttttctctagaaaacctgcatgtactcctttttaatggaatttttatttggctttataaaattttaaaatagccttttgggatatttagggatttctcaagaagaagttttataaaggttttatcatgtagaaaattgcagcattatacagttcaattaaatacatttttcaggcaaccttgaggatatgttgtctgtcttttgataaattattgtatagtaaacagaatttgtttatagagtcttgtatagcaagtctttatgtaggtatactttttagtgtgtgtgttaatttaaaaaccatacttgttcttaatggtatagagtattcgttttattagctttttttttttttttttttttttttttttactttcccagagtctcttggaatttaggcattacattcttttagaaactgttcttttatttctttacatcagagaccttgaatatttaatttacttttcagtaaagctgtcagttgtaatctacaattttaaaaaaaacaaatgaaacaaatcctcgtttcacaatttaaaccttattgagtctaattcactagagctgcaagtttattattctcctgcagtttgatgtgcctccaattgtaattgtgttgacccttcaatgcattaaatctccccagtgcttatcaaactgggagagataagtctacaattcgaaacttcattaaatatctcatttatattaaacagatgatagcttctaacggaaataataatttgttcagctgaaggaagtgcgacagttgtggtttcatgtgtgagaggagcgccttctctcccgctgtgctgtgtgatgctgccctcctgcccactcccccacattggcccttcctgtctgtctaacatcaaagcatcatgagataccagtccttgtggtgaacctcacagtctgcgttatgaggattgtagttaaatgttctttcattaaaacagatttgtttgaaggccttactaacatgaatttcttactcatattatttttatgtaaaatatgacttattagacacagctagctgttttaagaaatgcccgatacattttaatttattgtcatcgaaattgacatacattcattgcttatttattagattgtatatgtttttgaaatcctcctatcttggtgtgctttattagaatatttggtcccgattttcatattgttctgtacactactgaagtgattattgcagctactatcttgtacttaaacattacagtaaagataataccatgattattcttaatttctagcaggaggaatttaaaatcagtgtgttgttcaagacatctgagctgatatctttaggtcttgtagagtaggtaataattccaccagcacacatggaaaaatgtgtgctaattgttagatgtatttacataccataagtttaagacctatagctaaattgcagcttccattctgatcaagcacgccttttatagagtaacatctagtaaagaattctgaattacactgtaacttaaattgacttaaacagacactaacggtcaaattggaaaaataaacaacaagctctgattttaaaaaagccttaaatatacatatttttcctccagcggttgaaatctgacagaacttcatgggaggcatggtataaagtggcacagaaagttggtcattaggcagagctgtcatcacaaattattttggtacagggtgaaaagttctagttcatttggtacccagttggatacaggcctcgggcaagttgttataattctcccatgctgctaattggcctccaggtactgatttttctttgcccccatacccgttactctgtagctgaagtcacctgggagcccccctggacctgagctgcccattgaaacagcgttggatgatagagaacgaagaatttcccattccctctacagtgggattgaggggcttgatgaatcgcccagcagaaatgctgccctcagtaggataatgggtgagtcaggtaaaactctgtttatcacatcttattttgatgctttcattggtttactgagaggttattggtgtaatattaatgtactattagtgtaatattaatgtaaataaaaatattaatgttttcaagacaaaagagaacaggtttattaaaatcattcaggaagtgttcatgtgaagaggtaaatcaatccattgatttaagtgacttttagatcctgtaacatgacgaagcaaccaaaaagaaagggatcatatggaaatgttttctagtgatcaagatattctttacttacttgagataatatgtgaagctatgtttaaaaagaaatcaaaatttaatggcttgtggcaaaaaggattcaaaagttacatatcattcacagtggcactgcctggagggggagaaaaaatatttatatacagatatatgcacacatatataaaatattcacatgtatctggtttgtatttaataggatgttactgtattttaattgtattttacttttctgaagctttagttttaaaatcgcgaaactagtcttctgcatcctttgtttggattcagtaccatcctatctgcatggcccccagtgggtaatgaggttattagcacttgctttgcagcagttcagctttctactaacagatccagttcataaattcttgctttgccacaggagtggttggatttactgagctgctcatcttgcgattagcttgtgagagttttcaaatttaaaacacaagaagccattttgattaaaataacacctgacataaaacacttttattactggtatattttgcaaggctctcatttaaagtaaaaccctaaatttaactccattttgagtacatttaatgcagatttaatacaattcaagtttccattatggagcctcattgaaacagtaatttattcatcagtgggtgtttatggaaagcatgctattggcaagacattgtgtatatactgttgctgtagatacaaagatgagtaagaagcaatctctgccttcaaagaactttctactgggcatgatcaaaaacatacataaacatgtctagtagaattgtctgtttttcttcctctaatctctctagctttctagtttagaaaaattgctgaatatgtaatttcttatcttgttacatgtggaacttagacaagccagctttctggtgttactttgtcaacatttttctttttacatgcttggcgtaagtgaatgtcagggaagagtgccacacctgttgggttgaacacctgtcaggtgaaaggctttgtacatagtttatcactttcaaatctttgcttattacttaccactctcttcactgctgttggattttctgtactttcttggctttggtataaatctttatctttgttaaattatttttttgttgatgaaatttcagtccccttgagagagagagagtgtgcatgtgtccctagatatttgtgcacacaaagtgatatgctgtaatttcccctttattataggaacataggacttgccatactgaatcagaccattggtccaccagttcctgtaacctgcgtcctgcctccaatccctgatgcttcagaggaaggcgaaaaactaaaactaaaactcaaaccaaaaaaatccctaaattcagctagtgaccttttgaaatgctgtatatatgagttgaagagtcattcattttcttcctagtctgttgccccgattttgttagctacagcttcattagtcctcttcggtttgcattatagttgacattgtttcctcttccttctgctagatatgtactgaactcttaaaactccagatgcttccccagggcagtaacttctctcccagttctgtgttttgtgatgtgtatgcccttttaccactttgggctgggggtgacaaatgcgttactatttaagggtaggctaaattgatgtttttatgatttggatattttcttaagataatttttacaatttgtaacggaaactagggattctaaatagttttaccctgacaagtatatatgcatattttgattcatcttgtgttttgcaaatttgaaaattcctcactttttgtcagtccttattctagtatctttggccgtaagaatcaaatgcaatttgtgaaattagttaccacttaaagttagaaatcctgttcaagacgttaccttgcaagagaatgcccaaacaaggcattaggagaggtatggggcaaaaaaattaggaaacttgacaaatcacaccgtttctgaaccaaaattcggatttatgtttttctgagtcatgaattccatagttccaaagacattaggactttggatttccattcgcctaaaccaataacaacagtgtttattgatttgcacagtatctaggcgcatagatattcctcagactgtttggttaatgattgtcttctatatgtttggaatcactcctttgtagacattagtggaggttgaggtatttacttcatgatctgctatgatacaaaaggaactttgtattgaaattctggctgattaccttagggagttattaattttatgttaacaggttgaattttcatatggagtaatcccctatgtaggactctaggctaaacggagctttgaggctttgtgatgcattcctatgtgaacacatccctggcgaaaggcttttaaaagatacaccccaaaaggaagagcctttagagttgaaaggatgtcagatgtcatcagtcacactttcccatttaacagatgaggaactaagtcctgatatcccatgatgttttttgttttactttgtttttggctatttcctttttctaaaaatagccctctctggggaatgctgagatcttcattctttattagtatcaatttataattatctacatctgtaagcagttattcgaaagtctccagatcttattctatcctggcacccatggtgactaaaaaaatcaaagacgttaaatctttgaaagcagccttcaaaccacatactccagccaacttaccttatatgtcggggagttatggagcaaatacattaattaacttgacagaagttgcacactttctgtacttctgaaccaaaatttggatgcatgtttttctttatcatgagtcacacctgattaggatttccttagcttttgttggggtcagacaggattgtgaccaaaggcaagatttctctgtcatctcttttgacagaatttccacaatcatggattttgtaatagtcctggacattcatcagaaagtaacctgtagtggggctgcctacataggattcttcctttgaaaagccttaaacatttttctaatggttggtctctcttaactaacaataaaaaacagcaacaatgcagctgggcacagtggcttatgcctgtaatcccagcactttgggaggcccaggcaggtggatcaactgaggtcaggagtttaagaccagcctggccaacatgtgaaaccctgtctctacgaaaaatacaaaaattagccggatgttgtgttgcacacccgtagtcccacctactggggaggctgaggcaggagaattgcttaaacccaggaggcagagcttgcattgagctgaaatcgtaccacagcactccagcctgggcaacagagtgagactccatatccaaaaaaaaaaaaaaaaaaacaaaaacaaacaaacaaacaaaaaaaccagcaacagggatagtcagcataactaatttaaccagcacatccatttcgtaaaagacatcacacattgtcatttgtaagcctgggactttaactatttctcaacttttttagctgaataatttttctttttaaaacaaaactgaaatctgttgtatccattttagaatttatctcagtagtttgtatattcatatatatgtggtgagtttaagaagacgtatttagaacatttttatcttgttagcaatttgacatagaaaaatgaaacattaatgtttttattgtgagtcatgtcactggcacagttttcctctagtatcatgtgtggtgttaccttctatgtaaatttgccaatgaataaatgtttagtaaacaaacattttgtatttcattgtttcactcctctacaagatactgactagtttacttagtttgtaggtcactagttaactagttgaagatagaggaaagtttacctatcagaaataaattgaagccttctcaagtcatagaaggtttcacatttatgatgtaccaactactagcaaacataattaagggatcattgtattgtctaggtgcagcttagtagaatatgtaaagttttttagctgtccattaccctggtataatcttggagccataacccaaaactatattcctggcaagcatgttaagaagtggaaaatatgggttttcaaatcttgtggaaatactagcctttcaaatcatgggtgagaaaaaaatgctaaattattttcttactatgaggaagatttcttgccatttatctatgtatacaatattgtatcacaacagttaaggtataatatttctactcagaacaacagattacaaaaaaaatcatatgcccctttcagtgttcatattgctttgttaggccatctctcagaatatattgtgtaaaaccagaagttttagttttgtgtttaaaaatgaatgcactatgattatactgtaatattttcttttaataaattatgcccgtgtgagtatttggtatttaatattgtgacatgcctcgtcagtggtgagttgtccattggggtgactggttttataattctatatactttgaaggaaaaaagtatgtcttgagaaggaaatatttcttggctaatagtgctagaaagtcccaccttattgatgaatgacacttttgctgaacaggtttctatcctaatattctaatactgtattagaaataaatgagtaatttgaattcaggtaagggaaatggctaagtattacatttgatttacatttttatcattagcatttatataagctgttaattttcatagtttgtcaaaatgggtgcatttgaaatcaaagagaaagtttttcttggtaacgtgctgagaaggggtttcagtgaacttacagtattactacaatagtgtagttgatgttaaatgaggaatgcagttgaaatccccagcaagtttactttttgtgggttatcctgaaaagatgtagcaatttaaataaatttttctcctttgctgaaatgtctagaacaatacaatacagacttttaaaaatccttcacgcttgtgtatgccatcccaacatcctcagtcatggcctgaaaaacctctggccactcagatcctaattttttgcatcaagatcactccaggtatctctccttttctaggctttgtttttggtaatactcatcttttaagtttcacctgactgcatcatgggcttttctccatcatgcatttaataatgatgttgttgctatctaaaataaatatcatcatttcttctggcagaaaagatcatattgaccatttaaaacctaattctgatgttaacttttgccaagatttccagcacttcctacccccagtaacccaggcaattacaacacaagtgaatggctttggactcatctctacaccaccatataattatcactgcttgtaattctttctccttcactagggcatacgtcctttaaggacagagactgtgtcttgcagtacctgctctgcagcagttgctcaatgaatgaatgaataaacaatgcaagttagtggggcttctttgtaaatttcctggtaatttttcaaaggacattcacagtttagaatgcgtgtagcattttcacattataagacatttgagagagtatctttggctttaggaaacttcaaaccagaaaaattgcatgcattgccctgagctatatagttgtagcgtcagaggtagtaatagactcgaggtctctgtttgacaatcatttatgaaaaataaatgtgctaaattctgttttgttctaccaggttgagcagatatgtggaaaattagacttttactaatatagcaaagtattaaaattaatagatgtaacactttgatcgatgtctagaattttctcttcttcttttttcactggacaggtaaataccagctgtcccctacagtgaatatgccccaagatgacactgtcattatagaagatgacaggttgccagtgcttcctccacatctctctgaccagtcctcttccagctcccatgatgatgtggggtttgtgacggcagatgctggtacttgggccaaggctgcaatcagtgattcagccgactggtaagctcatcgtccagggttggaaaacatgaattaattacagtcccattttatgtttaagtggcttactgctaaatacagttaatcatttttttaatagctctgtcttcatggtttttatatacttatcactcttataataaaagattatacccgaactctgtaaatttaattgttttagccttcaagagctatagttagtaatataaccaaaacaatgacaaaactactaccagtcaaaaaaccgtgctcatttgtttttcactttcactttatgatttatttcacatctgtgttaatttgatgcattgttttttaattaaataaattcttggtaactccctaaattgatggcaacaattagatacttttgcaaaactaagagttgatgtgttctaagagtgggaggaggctttttttaaagtgtttttttttttttttttcagagtgctataaccatactgtttaaaatgctttgtaattgcttttaacatagtgacttctggggcactccctgctattttctttcctgtgtctttcaaaatagaagaaagcatttgatactactgagccaatgtgtggctcatgaaggtggatgtgtgccttaatgtttatgcctagtaattatatacatcaataagcaaaagcagagctcctcttggggacgacctcacaaggttgtagtgataattaacacaaaccatgtgaagtattgtaccagaattttctcattgccctttctctggggtcttttatgaatatatcagcaaaatcatatttaaatgttatggtgttgttccttcaccacttagccattcctgcttcctactgtttttctggcttgtgtcaacattaaatattagataggaggtgtctgggggactggcatttatttgcgttaacatttttagtgatgatcttaacaaagtgaaccactcccccaatcctcttccctgactctccacatgaacacacaaaatacagttcatttatctgttaattatgaagatgttctcttggaataaatcacacctcttatttgggaccttgaaaagttcatctctagcttttcatttctttctttttaaattctctttttgaaagcacaggatttaaaaatagaactaccctcaaacctgtatgataatggcccatctttgaatgaggtttttgattaaacatagaagggaagactacaatataaagtaaaaacccatttgaaatctgcagatggtgttacattgactgctgtgtctcatatctctttctgaaaatgaaagtagcaacaacagagaaagcaaggattagatagacgcagtgttcatcttagggacaaaagcctttaaatctctaccatgatgagaaattgtggaggtggtcatagtctttggggcattataaagcagtatattagtgaaaatagataaataagtagaagggatagattgtggcattaatttccctaagggggatttgcaaaatggtgaggacttggataattttgctgtggggaatgtggggcaaagaaaataatatgaatgaagggttatccaaacaagaatgccagctgttctgaatcacagcagaaaatgcaagcttttccagcctgacaatatcttccctaatccttgatgaaaatgctatgaaaacaaaaggccaataagacaggattaataactggaattttaataacattaggggtcaggatatggttacattctttaaagaatcagctgtcattcctgccatctaacttgttaaatattccagtgtaccgtttattgtgtctgaaataagtttagtgggaatattgatagggaagaattaattttgtcatagtttaagaatatttagttatttaagactcttactaatgcacaaactcatttgacattttaaattgtacatgtagttcactgcacagttgtcgaaggccatgtcaaatggctaaacttacttgtttacttatagaatatactattttcaatccattaatcaattgagagaacattaataatgtgtttctgggggaaaggaaataacagcaaaattctaatcttaatggtaacataattttagaggatataaaattaaaggtgcaccaatatgtggttttcaggcgagattggcagtgacaatttgtatttctttgaaaaatcttttaccaacaatttatttctactaacactgtatttcaaatgcattctgtttacaagtttggtgcagtattggagttgaggttttttttgttttgtttttgttttttttttgagacggagtctcgctctgttgcccaggctggagtgtagtggcgcgatcttggctcactgcaagctccgcctcccaggttcacaccattctcctgcctcagcctcccaagtagggagttgaagttttaaattattctagaagaggtaaaaagaattggttagcatgtgcagagtgactgaagagatccactgacaatatataaaagaattattggaaatatattatttagagtttgctgttgcaagattgtgtcatatttcttatcatatgggttttgattttttacttttagaagtgtgtttttttcacttgggtgtatgtgctctcatcatataagccatttacacctaagcatagtagtatgtgaaggggcatctgagggtagatgtctgtcatcataatttgtgtttgataatttgagatagtcttcattgggtgatgactgacttgtttagtagttagcaatttacatggggctttcaccttaggttgctgaattctcttgttagctttttaagtgaatgagacaactgttctctttattgagcatatttaatacataatgagctcaaaacatttcaagtcaccctacccagtggcagggcttttgcctgctatcttacttttcaaacttttaccatagctctttaagagccaactctcatttcatgcacagtaaatcgcaactaaatttctgatgtacatccaaaggttgactgtttttttactagtatggatgatagttcttataaggccataaagggttggaaaagcttgcttccatcagaaacatgaggaagactatcataaattcagctgacagtggaaggagccctgggcatttttagtgtgctcagttagctgtagagggatgttctctcacctggccagataggcaaggtggccggacctgatatagtagagctagtatacttacttacccaatgtgcccagcacagagaaaacccttttcatattatgaactgtggctagaacaccttatagcactttagaatgtgttcacagatttttacaaacaggagtgattctgggacatcttcaaccacttgcgttggaggaacacttcagaaggcatcctgttaccagggatttgccatatgcttccttatcatgcccgcttgagccactgtgttggtgtcacccaaatcaaatgtcatctaaacttagtcattttcttcctgattctcatatactgtttattcactcatctatgcatcctcagcatctgtttcagacttctggtttagtatttttcttatgagctcatagagtacagggaatctttcttatctgttatttggatctacgtacctggcacaatgccttaatcagaataggttctaataaatgtttgttgaattgatttctttgttttaatatttcagagaaactgcagccttatgaaatggcatgccataatggcattttttttctttccttaaaacacaacataaaagatacataagaaggctagaatgtactctttttgaaacttctatttagttacaatttatatggtcacttgttcgctgctagtgtttgtatataatatatgacaggtttcctgaaaaattcagttgttctaatatcaggctcattttttatgatcatcttgaaataattctgtattgtcaaatagagtgaagaaacagagaggaaagtagagaaggagaaaattcacatggagaaagagttactctaaaagttaaattaattttgtatttttctatcactttctatacagccacagttttttttttaatggactgtatttgtattatttagttgaatttttcttgaggaatatacatatgtatatttacacttgcaggtatgtatgaacctccctaaaatggatgcgtgctatttttagtaaatatttttatttttattttttcttcactccagctctttgagtccagatgttgatccagttcttgcttttcaacgagaaggatttggacgtcagagtatgtcagaaaaacgcacaaagcaattttcagatgccagtcaattggatttcgttaaaacacgaaaatcaaaaagcatggatttaggtagtgagtacaatctccatgaatctttatctaaataagttttaaatgctttcaggataaaattgatggtcccaagcagatgtctgtttactttgagcaatagagaaaataaatgtgaaatgtggcaatttggcaaaaattagtttttctcccagtttgagataacgatattactcataagtggcatgtttacataatatgcaatatgttaatatatatgttttcttaagagaatggaaacaaacacatatgcatatcatgctatgtccatgtatctttattttacaaaatgaaatgttttaacactttggctatttaaaaccaatttcattgaaattgtatttggttggttgtgggatttttgaactagaagagaaaattttggagagaaaccattatctcaatccatgtctagaatttggttacttcatgatgtcttcctttcattgctgttctttaaggtttatttattggaagctttcatattttgataattaaggcatttaatcaaagtaataatttgagagtatttattatagaaagtatttaggagcaaatgagaggaggaaaataatcatagttgttcaaacaccaatcaggtagtgtctctttaaatccaaatccaccaaaaaaaaagtaaaataattaattatatttatacactgaatgatttaaaacctttgttaatcaactgtaacttatgctgttctctggtggctgtttgtattccaagactaaaagcattaatttatcatacgcataaagaaaaatttggtgatgcattgccttggctaattatgatatgctaacatataacacacatgtctgtgaaatgaaatgactggcatattgcatggagacactgcttttttttcctccttttttgattatgaatgtttgcttgatgtttcatagtatttgcatgaaatattagctgaggatcgtcacctaactaaaaagatctgggaatggtggaagcatggtgggctatgggaactaactgggctaactattatacatttaccttttaacagtagctgacgagactaaactcaatacagtggatgaccagaaagcaggtaagaatggacagttagactgttgccatagaaacgatggcccacatagcttatcacaattatagagctgccaatcatatgccatgtaaacatacatattccagtcttacgcagatgttttcattgtgagaaattgaattacataagaaaagaaatattttctgttagtagaaatttatcagtggtgtacttactaaatagtaatatgatttactgcttcaaaaaggctagaaacaacctagattttcttaattatattcatgtaaggatgttttatcccaatttttaaaaaatcaaaatcctgcaaacgtgatctgttatggtagagtcctaggtttttaagtcagctatgtgatgtctaggttaacatccaaaaagtgattctcagagtggtgattttgatttgaaagataatagtgccaatataaatgtttttcattgtaggacaacgtccggtattgctatcattagtcattcagaaaggcatattctttttttgatgctggaattagcttataattaacctgacgttggattagactatataatgcatatggcttcatatcttaactttgtgagcttgttctaaattcgttacttctaaaatactgccaaatcattccatagaaacaatggattatattgaactgggattgcattatagtcatcgattttgctttttatgttattgtatgacagtaatcacaggaaggtcttttaagtgtagttaacgtgctttgtataattgaccatttatgacttattataagtttggaatagtgttttaatctgtatccagtatgatgtagttacactacttagcactaattagcttcaatttgcctttttaacttgcagtagtaaattagttttagctgcttaaaaaatgtgtatcccacatatatatatgtaaaaattattgtaaacatggttggagttatattctttggagtataagatagattgtaaaaacgacatctaataaatcataagattaactgtattgcacggcagttaaccgtagccttatcccttactgagttgtttgttgttcttatgaaacctaaagtttattgaagcagagctaaagagaaatgttatgtgatagttcacatatgtaaaatagtagttagtttttacagttagcagtataagcaataaccccgatccaagtaaacagtcataaaaaccaaattgagctgctcaggtaaaggacctgacttcatatacaatgtcagttaggtaaaataagaaaaatacttaatttaaccaactcacagctactataaggaaaaggacagtttattgtgatctacaacataatgatatccaagttataactcagtgcgttagataactttcatggaaagtcattacataagtttcaaggcagattttatagtctaatcaaaaatcaaactgtgctagattctagagaaaaagaacttttttttttttttttgcactttgtgcagtctattctaccaaattaaattagaaaatattggggcaaaaaattattacaaagatgtcaaaatacttggtctgttgattttacatctaaatgaataaaatacctaaagtagatattttattatttccctgtcccctaatattagacagtgaaaagattttcacttatttttctttcgtcacttcacttgacttgagttttcaagaaagattatgattttatagattagtccaaaggtttttgggagaatcatagtggcattttagcattgaacatctgtctagcctagccataagcctttcataatgaaaattgaattacatttccctctgccccttgcaaaagacatcctttcctttcttttttttttttttttttggcaagagggatattactaagtaggaataggaaacagatctaggaaaatagtatgattatgatttccctctttttttttccatatttaggaatcttgtatcatattttggggataaatatttctcctcaaattataacaagggagaacaggtataagaagagaattggatttctaatggtttcattcttgaagtatagagattagcaaagtatgctaatgacctaaaagatatgtgtaaagtaagagcttaaaatattgttttaaaattaagacaaaagatactaacttttatgatgtaaataaaatcttttccatatattttatgtacaaaaagactttttcaattttcattactagtaaaatgctgtttgtattgttagggaatccttttaattttttttctaaagacatttgactgaatcaatgtgttagggattttaataacttcgctgagaaatcctaacatatcattcaaaacctttgttatagtttcttggtcaaatatagtactaaagtgtatgttactcatattataaatcgaatgttagcaagctttttctgtaaaggaacagatggtaaatattttagatctctgttgcaacttttacattctaccattgttgaatgaaagtagtcatagacaatatgtaaatacatgggcatggctgtgttccagtaaaattttccacatttgactcacagtttgctgatctgtgttacaggttcagaagttgtagataattgacattttgtataattttttattgtaaaagttttcatctatacataaatatacagagagtagttcattgaccttccacaaacccagggcccaccatccacaatggtcaacagtttgccaaaaggttatttcagagtgttatgaatttagggaaacaaataggtaggtatgctctgaattgcacttacaaaattatcgtttatcgaattatactttgaccattgtttttctttccaagtttgcctgtgtttatgcttagggacactcaatttcaatgaatactcatgccatttctgaaatttattatttaagtttttattgctgtcagtacactaagtaaaatctcagctaactttacacaaagaaaagctttatataaatggtgtttttatgagaattttttctggaagcatgaaatctttattcatgatatatactcacatacaaatacatacacacatacacatatccttaataaactcaagaaagcaccaaatatttgcccaatacatgtgtatggaagccaaatatagctggtaaattatgaaagttgatagacatttattcacaaaaggatctttccagtgctaattctaggaactataaaggtaaatatccctgcccaggaatgatcttttcccattcttttttattccttcatttcttattatgtaggtttttggaacaaaattcatttttcttcccatgacatgacttttatgagtaatttagaaaatgcagttgtcaaaaattgtagtgctgcccagagaaaaagtaagatggatctcattcaaagaaataaatctcatgaacttttgtcataaaataaagaaatatagacaaacctgcactgagaaagctaaatatgacatctttttctttccagcacaacaatttgtggaatattatttcttcattagaatcatgtgtttgccttcctgtttgtactacattttaaacatatctattcttacccaaaatagcttcatttaacatcagtgaatcttaaaaaattaaattttgttttgagtctttcagtgtaattttaattctattttattttctgagctgtgaaaagcctatgtcacaactatttgtcttctgggtaataacatgatcaacatatgggctgatgaccccatgcagagataaactattttgtttctcctaccctctatttttttcacctgtctttttaactgtatatatgaagaaccagttctataacctggattgcccaggtggtggtgcagagctggtatttcagtcatccggaagctaaattagtctacctttgagtatcaggtcaggcagtgatggatgaggctgtcttacctggttaaagaaatcagttttgattgccttccacaacttggtactattggtattatcttgggtccttctgccctagatcctcaggaaatagagccaaatttttaattcccggaatttgtccctgtcatcctcatgaaatgttctggttaattgctaagtcgtctttcttctgtccatcacctgtttttcaaacatattgttcccaggcctagagatagaagtactcatatccagtctctccttttttatttccctctgagagagagcccttatgtaatctgtttccgttcaaagcttgtgttactcttcctatagaatatccatatttcccagggttgggtttctgcctgctgccaggttgccctaactgttttggtgacatgttggcccccgtggtcttactccttatgcagtgttgtgggtctgcagtttagcaaggaagagacttgacaatgcacattgatgtgcatgtctagcttctgttctaaagaattttaaattgccaaaaaaaaaaaggttttaattaagtgcaaagcttattcttggttgttgaccttagccttctcctcatcttcccttgcttttcaaatgagcttccaggttattctggttcttttagattattcctattaccggagcaaaacgatttgacaacaatttcatctgttgaaattttttttaaaaagtaatgacttagagtttttcctaatgcaaagagagaaaatagaccaaatctaatataagtttgggaaaaataaaaattagcaactattacttcatttattctttgtcttttccatctgcattccagaactcatcattgagcaaataattgttatgtacctgaagttttcgacagtgcatattcaggtacataattttcactaattcacactaacattttttttcttgtaaacctcccaggttctcccagcagagatgtgggtccttccctgggtctgaagaagtcaagctcgttggagagtctgcagaccgcagttgccgaggtgactttgaatggggatattcctttccatcgtccacggccgcggataatcagaggcaggggatgcaatgagagcttcagagctgccatcgacaaatcttatgataaacccgcggtagatgatgatgatgaaggcatggagacctgtaagtttataatggctgaaagaataataattaaaattagactctatttcttaaagtgagctccagggagccctggagttttctaagattcttcagggtaatctctgagatctctgaggtctaataatctcttatttcataataagacgatattatttgccctttactcacattctcttataagtatacactggggttttttggaggccacatgtcctgtgatactgcattagattgaatgcagaagcagatatgagaatctgtcttacaggccaatattaaactaaaaattctgaaaaaatatttaacagtgccattgttctcacttcttttggaatatatatattttttggtaaaaaatgtaatttctgttaacacgaagttgcttgtttttaaaaagtaatattttaaaactttcccagttttaattcagtacatgttgctagatataatccacatataaaaaagttatttggagtgcttaataattttcaggggtgtgaagtcatcctgagatcaaaatatttgaaaaccactactttgtagtgtctcaaataggatgtctccattgagtacctgtaataatctgtgatcttaaaaacattttttttttctttttttgctttcaggaattactcattctttcctataactaaactagcaagctatatttatgtgtgtttattttgaaattgcaaaatatttaaagccaagattattaaaagtcaaaggttaatatgaatgttttccatggtttattgaataaaaaataatttatagataggtacaaatatatccttccagagagttaaacatttcttatattaaagtaaacattctattaaaaagtaatggaaaaactctaccgatatatttactaagaagcaaaagggcttaggagtcctaatagtgaaaattgttgattatcttatattgctcataactactaatttaccttttagtgttttaacctcaaatgtgactcaaccatcaaactattgtacgaatagttggagggaccacagaataaaactaaggcagagaccagagataatttgtgtagattgtaaattacttgcaattcaacatttgagtggaccacttctatcacatatacctaagaaagactttcgtgggaagaagagttttaagtaataaagatcacattttgagaatatatacatatacatataatgtatatgtatatatacgttaatatacattgcttatacgtataatgcttatacatataatgcgtttgggaagatgaatatttctgtcataatgtaatatgcgaagcataacttagaggattgctacacttctctccacctccacctgattctccatctaaatccaggcagttttgtcactatgatcagattcctcacaactgggcctttccaggcccagtttttcccttttggcggcctctccaggcccagaacttccttaggtcagcctctccagacccagttgcagcctcctggtgtcctctccaggcccacctcttcctcccggctgtgaatatatgcagcccattcttgcaggatgaggagcatatttactatttttgctgccaaacctggtctccaagatcctgagtcatataagctttcgaccctattgagttttttctctttgtaataatggttccttgccatcctaatcaatattacttgacaattatagagcttgcttctctctgtcttgggtgtatatttaatcaaaaattactatgctttggccccttgatatatattttttaagtatctataatgatgcttttgaacttttttcttgttctggttaaaatgttatttaattttccttaaaaaatgcagtttgctcttataatatttcactcatttcaaatgtaacaggagatagaatacatatgaatataaggtatatttttaattctgtagggatagcctccagagtgtcccaccaacatggacatctgattttgtccctatataaacttattttttaaaaaacaaaatgagaaataacagtatattaaagttcattcatgtatctgtccttcagagaaaaaaagtgaaatgaaacacatggataggcaaattacaatttgcaaaccaaagataaagttctggacaagacctgggaaatacacgtgtggcaggtgccctaaaacacgctgcacctacaaccaccaaatgttgtatttttcaaaagtcctgtttttattattttttgcataccagtcttctgaactttgcatatggcaaatgaatggcaactattgtaaattccaaacttttccaattttggttgttgaaatcgtgtttatagggtggaatgaacacagaagtggaattcaggtgacttgcatcctcctctacattcttctaagtaatttgggattttagtcaaaacttcaactgcttgagctttaatttcttcatttgtaaaactgaagatttggactagataattgactttcaactggtgtgttgtgatctctggtcaggagcagtacctcaatgggtttggagagtgggaaaggccaccagtgtcaccttccccccaccaccaccttcacagttgttttactcacttctgtacatggggatcctttgtaaattttagtttttaaaaagggtgtttttgagtatttaggaaaaagttgtaaaagttctggcttagatggtttagatggtttccgaagtccttcctagtttaacattccatgattctatgtaccccctcactgccctacttctggcacgctaaccccctcaccttttgcgaggcccatgtggaaaacaccccatctatttccatcttgcattaccaaacacaaagcttggcaaatcatagaattaaataaatgtctgccaaatcgatgagtgggtgagtgaggtatcccacactggaccttgtatgcactagatcttcaatacttcagcaaactctttgtttttgtttaaaaaaaaattgtctatcaaatgtggtgttactgctggtggctgtcagcttacataaaactgaagacgcgaaggcactttctgcctccagctttggaaagaaggctggctcagttagccctccttcggcttcctaaccacaccattttcagcgtctggcttgtggacctgcacagcggagtctctggacttgctgtctctgtggctatgctcctgcatttttgcccttctgggcttgtcccttagctatgtgtcccctggctgcatgtccaacatcttctattgtctgtgctaagtgggcctcaggggaagtgggttctttcttgtcccgatggtccaactcagttacagctgcccgtagaaattaaaaagccacatcccccttgaacctggatctgaaaagaggaccctcgtctaggcagatggtctttttgtcacatgggacatttcctgaggatgcagtgcaccctggaaatgcgtggctagagactgagccattgtggaaaagctagttatggaggtcagcaggaacagagagctccttgcaccgtgctgcaggctctgatttctatcatcatgtggcacttttcctctttacaagtaagacacataggcgtaggcatggttgattgcttttgtcagttgggtcgagcccctccccagtgactatattcatggcactgaacaggctggcctcttctcagcagtgtggaaatcatggcatgggcacagcaatggggccaagagactggggtgggatccatgtggtatctggtatctgtcatcttctgcagcacttacattcttcctgtggagatggcagaagccagcatttttgtgtctcatttaatccatctggcctctccatgttgtgtgcgtctgtctggatcaagatggagctttgtattctgggacccattatctccgaggccctacctgtgtttgacaggtcagggcattgacaatctgctccctcttctatgcaaattacatgcccagcctggctctcagcaagcgacttctcctccccatgataaatcagtttctattgctaccaagaaaatgcatgcagtaagattgctttgttttcttttaaaaaatacattaattctactttttcgtaattaaaagttgccagaaattgtaagccctgcactcagttttgtaacagctttttgttaaggttgaggaagtgaaacagcaaaactaaatatctcctattaattatacctattgattttaagatatatcaagttcagaattttaaatgtgacaaactttgtgccttgcaaacatgaaggcattgtcttcaaacatgaagtaggtagcttgcataatttcctatagagctcttattaagagataggagaaaagcactgctccagaatacacataatttaggttttcagtatgaaatttgaagaaactgaatttacattattaaatcaactaatatgagagcttctaggggaattttgttattgttttattagctatgaaataacatattgcctttgatatctcattttctactctcagtattctacccacttctagccacctttcatcaccacctatttcagcaaaaataatgcaaactaagtataattttatcataagcaaaacacagtggattacagtaaatctattgtggaagaatttgggatcagatttcaaagtcagagtactttgtaaactgtttcctatttggttaatccattttagtggataattggatgttgatctataaaaatacttgttctgaaatgctaagaagaagaataacctatcacatcattttatgcaaataaaatgatacatatacttaacctgcagtttaagaaagggagcttcgattaatttttaggaggtttctgatcatagtatgggtgtatggttgtgaaataaccaaaggtattctctgcatttctttttctaggtaaaatgtaacttagcagaaagtgcaatgaatattgacatctgaagtgttttgaatgatagaatcctcatttctaacttttttttttttttttttttagaaagagtgtcactctgtagcccaggctggagtgcagtggcacaatcttggctcattgcaacctccaactcccaggtcctggttcacgcaattctcctacctcagcctcccaagtaactggaattacaggaatgtgccaccatgcccaagtgatttttgtatttttagtagagacggggtttcaccatgttggccaggctggtcttgaactcctgacctcgtgatctgcccaccttggcctcccaaagtgctgggattacaggagtgagccaccgcaccaggccccattttttaagaggaaatagtatctatatatttgactaagattacacttaggaactgaatcttagaatgcgtatcttctaattctcagtcctgtggtttttctagaatatgaaacacacttccaaacagaaagcccattgcgctaaaactactgcagagtgtgtacctaaagtctgatatttaggctattagttcctaagggctcggggttgggggatgattcaacccagtggataaatgagcacttgataaggagtgtggttcagttccattgtagtgtgtaagttagtgtgacactggggagggggtggtggtgtaggggtgcccagctgatgtggaattagggaggagaggaaagtagaggaggagatttccagaagagaggtattggccgagttgagtgttactgcttgagagtcttcaactggatgcacagagaaatatggaacatagggaatggggagccatctctgggctgcagtagttctgttaggttggtgtgtatggggcaggtgagagcatagtgaggagtgaggtttaagatgtaggtgcctgtcatcccagcactttgggtggctgaggcaggtggatcacttgagatcaggagttcgagaccagcctggccaacatggcgagaccccatctctactaaaaatacaaagattagccaggcgtggtgctgcatgcctgtaatctcaactacttcggaggctgaggcatgagaattgcttgaacccgggaggcggaggttgcagtgagccaagatcacgccactacactccagcttgggcgacaaagcaaaactccatctcaaaaaaaaagatgtagacagcaaaccacagactattttaaattacttgcatttcaaataaaataatatgatgggactctggggtagagggtggcttattgagatgggatgataagtagtaacgtcagggcaaggagctaatttctgtgatagtagtacaatcatccaggtgagcgatgatgcttggcagtaccagagcaaaggaagaaactgtttacgggcttagcgtctctcacacaaagatggatgatgatgatgatgtgatttctctcattagcacttccaggctcagaaacttggaatcatcatctcactgtgtcaccactccattaccaagctttcttaatctttccacatgtaatctaatctcaccccttacttgcagtctaggccggaccctcgttatttaatatcagaaggtattgctagtgtctcccaactgggcctcctgtctctagatgtgcccagtgagctctgcagtcaccttctgactctcacagcccctcaagtgtccgtgcttacccttgcctgtgccatgcggtgcacacttcgtgaggtgtatcttctttcttccccagccctctaatgtgtgtatattatactgtcatcttccttctccaagaaacttttcccccgacaatctagtttttcttaagctccagctgattctacacagtgcatccgagactttttagtataaattatttttttaacatcaggaaatttttgcggatcactcaatatagattatgtttcatggtaggtaagaacattcgcttttgggaagcaggcattctgattcctcacacacacaaaagcaaagtaaagcattgctagccattcactattttataatctctaaacatttttatgctgttaatttttgtgtttcactcaaaagagtctgagcagtggcctgaaatctctttctttgaccataaataatagtttgtatgttgttcaaacagacgttgtgtacgttaagctcactccttgattaaaataaaattctcagtggcaattccaactgtagggttaggaatgctgtcatttcgattgtgtagccagccctttcggtcagaattggtttttaaaaagccttcagcttcattttaaattgtccccatggacagaaaacagcatccactgtgggccgtcatttgaatgttaaaatcagttggacactaaaagcgaatttgcgaaggttcagaaaattgagggtgtgaccctcattgtgcctgctctgcaacattgtctagggaagggagggataatggaggtgacattctaccattatctgtgggagcattttacctgcttcatttgagggggatgggttaaagagaagtttagaatgtcaagtaaaagtgaagaaaggtttttggtaataactctttaaaagagtgatcctattgtttttcttccttcacccacatatattgaaaggttttttaaaaatgaaatagagctatttttagagtagagtgtctgaggagtcatctatttgaactttctcccagttgctgaaaccactctacaataccactaataaatgtcacctgattccttcatagcttttttacctcctcacagtcttcatcatatcagttattattctcaccccatgtattagtctaaaagctctaaagtcttcctgtttcatgccagctttgtgtgtgtgtggtttcctttttttggttttcaggaaaagctaagtttttctgttgccaagagctcatcattctaatgttaaaagtcagagtccagaagagcagatcatgttattcgacaccatctgtgtatcactagctgttcatttcctacatctttctttctcttccaaagtcaaagtgttccaccaaaataagaaataaaaacaatatttatgtccccagcgttcttgattcctatgcaggagtttgcagcgactgaaagtccagtcctcatttagttgtattatctttttacctaacactaacagaaattggtagtggtcagtggatttactaaatccagtgaaattttctattttgaatgtctcattttaacttaaaagttttgttttaagaatatagcttgtgaagactgagtcaccctgtgtagaatttttacatttcatcctttatctttcaatataaattgtaaattgctcaagtatctgtgttcctattactaagtattcctaattctaaggtagttcatagttaaatgggtgcaacaaagggcagttcttcatattgttggctgcttattcagtccttcatttaattgctcagtgagtatttaatgatgcttcttggggcctctccctcagaggagagtattgttgagttttaaatacaaagtaatactatgatattttcgttttgtatatctctatttatacccattgaacaattcattttaatctagtagcaaatctaaacaaattatttaaatctagtaaaattgccaaagctacctaaaatgatatttactgctaaattatacacttaagacaaataacacaatagatattccacagttgctctaacacttgctttatgcagtgtaccttttaggatgctttcagctatatgtaatagaaagtgcaactcagaccaactcaaacaataaggaaatacattttcctacataacttgagttctagagttcttcagagagatttctccaaagacccaacatttttctgccccttctgctctgctatccatgagtcagctacccacaaaataattccataattcagctatccatagggtaattttagggctcagaggccttttactgtcttattgctgtctaacagaagggaatgagccctctccctaagcatggatatgtccattgagtccaacggggccattcttggtctgataaccttggactggcaagtctgcaggggtatggcatccataaacttaataatgaattcaccccttggagctaggttgcattcctggacacagagttctattaggaagaataaagggagaaatggattttggataagcggccaacagaaattatagtatcaacagtagcatcacttctcaatgggggggggaaatagactctaatgaccttgaggctttgagtcaaccttgactgtaaaatgtttgtaaagtttagatagaaatagattatttatggcagtagctgcagaactttgcacttcaatgaaaacccaaagtcattttctccatcatcattaacacgtaaatgcccgatcttttccaaacttgttggtgatccagtcctaacatgatacctttcagagttgagtgccttaatttgtaacatggactagaattttaattgagctccatttgcatctgttgaaaacatggtaattaggtatgtcttaattgcagaatgactctgccacattaaagagaaataagcagcttcatgctacaccttctttaaaaaaagaaacttgaaagtgcctatctttataggtaatcacatggaaacatagctgatagttcagtgcatagagcaggtttaaacaggcagaaatgttgtcaaaaatggaaatttctatttgtttggaaggagataatcatcgctctttgtgtagggtatctgcaaaaggaaagcaaatagtctgtcaaaatgagcaaaattaaagagaaaaaaatcaagaaatgtatatagcacttaaaatagtacattatctaaatgtaaatttatgattagttcttaccttgtaatttgctgtatgaacacaatagatcaagccatttattgctgatatattactagtacttttcttacttgaaaaattgtttatatgcatgttcgtttaagggaataaagatattttatgtacctaattataaagctagtattaaatgtacagatttattttaaaacctaaaatctgactagtacatcagtgactttgaatatgtatatttttttcaaaaattaagcatgtgtaaccaatttatttgagcttttgaaactacaatatttctgcataggagcaggataaagatttttctctatcaaataatttcagaatttgaagtatatataattcagtactttaaaagaacatcttatgtttgtacatatgaagctacatattgctaaatatttttaattagttggcattcaaagggattagttaaatcagtacacccccagaagagtttctgtgataatgtattatctaatttagaatgttcagaacaagcataaagaatcctccaatgtgcaagtgtcattttaaacagtccactggcttggggcaggaaacagaggtaggacttttaattttataaaatgaggttacaaaacctgaagctaataattgatttcatactactttatttcacatactttagaaaataagttgtgttacatacaccagaaaattattttgaatatgaaaagaattggcaacaaacgtgacttcagcatatagtgagttgtgaaggcactgccattattctgttcccaagccaagagccgacatatgccccttgaacttctgccaaaactattaggcagaaaactaacagaatcgctactgatagttccattcatgatttatgataatggttgctgtggaagactaaatcatttacatttattgagctcatttttctgtttatagtttcagacattgtagagggtcgtaaaatctattaaatgatgcatacagcactaacaataatagcatgaaaatataccagaaactaattagagctaaaccaaatatcatgagcattcctacctagtgttactgtagtcagattgtggctagtcttgtcaggcttgatgagagaacagtaagcatttttctaaagctagaggaatggtgatacctggcgattagataaagttttggtcaggataaagtcacaagtcagtttttaccaaaagtctttcatttatgcagccatttatgagcagctgctgtttgccccacagtcttcatttgaggagcttagagaatgggagggagacatgtatgtgatatcatatgagaagtgcaataataaaagattgtacaaataaagagctttggaagtataggtgaaaggaggtttccatgcaggaattatacaaaattcactagcttccatttatctagtttgagtataccaatagacctaggtttttatagctccagagaacttctgggaattgttctgtaattatttggtcaattatctcacatttgtggccacacccatatctcaaaaacctgaagtactggttcacaagcagatagaacacagccatgttcaagggcattaagcaacacactacagccctgcttgagctatgtttacattctttgggggagctctcatttgaaaaggctgcacataattagtaagcccttgggccaactgccaggatattctttccctgctctgtgtacaccacaaaaaattatagcctgaactcagtattatttgtaagattatggattttcactatgtccttctagttgtaactggcttcttctaataaacgtgcacaattactatttatatcttaatagcgaggaaaaggagcaaattttcttaaaagccaccatgtcctttggaggaagacaatggcttacaatgagataactcgcagttcagaggaaggctaacgtttctgaagtcatttatatgcttgggctgggtgtgactcacccctgtaatcccagcactttgggaggagaggctggtggatcatgaggtcaagagatcgagaccatcctggccaacatggtgaattcctatctctactaaaaatacaaaaattagctgggtgtggtggcgtgtgcctgtagtcccagctacttggggggctgaggcaggagaatcacatgaacccgggaggtggagattgcagtgagccaagatcacaccactgtactccagcctggtgacagagtgaaactccgtctcaagaagaagaaaaaaaaaaaaaaaaaaaagtctgggtgcagtggctcactcctgtaatcccagcactttgggaggccgaggcggggagatcacgaggtcaggagctcaagaccagcctggccaacatagtgaaactctactactaaaaatacaaaactactaaaaatacaaaaaattagctgggcgtggtggtgggcgcctgtaatcccagctactcgggaggctgaggcaggagaatggcttgaacccaggaggcggaggttgcagtgagtcgagatcacaccactgcactccagcctgggcgacagagcgagactcagcctcaaaaaaataaaaaaaataaaaaaattctgagctttgttttttgcattatgataaatagctggctttttaacaaaaaaacacaactgtgttacttgggcgtagctataccaccatttgatagtctcttttcagatttgtgagggtttaatagcagaaatctaagatattgggacccttttagctggtcttattatacccacgataattgtgtattgctattgaaagtgctccttgctggtagagaggaaggactgaattttactgaggatatattaacttgatttggaggtcagttctttgcaaaagtttgggaagaggccgaaccattctgtttggctctttgttataagaaactcagaaataatgatctatactttctttgttgatgctggaaaaagaaaaatgacttaagaattcacggagtaattaaccttatggccccctataattctcattgtatttggaggagaaccttaggtgaccagtctcgaaagaaagatttctgagagtggatgttcatacgtgtctctctgcttcttatttaatagagaaatgtttaagctcttttggtagggggagacttacttcagttacttgtcgttctttcaactgcaaaaagtttggggtattgaagtgcccttggaccatgtgcttacgaagtgttggttcaaggaatggaatattgttatcactaagcagatcttttatctgcaaagtccagagaagtgcacttattgatttactcattttcatggctccctctacctctgttcagccgccatgatgcagataggcatgcaagattgtttaggattagaatatatagtagcatttacttctgatgttggccttatgcaaagaagagttacagaggctgtgcagatctgttgtagatataagccaaaataatctgctcttctgtgtgagcaggatatgttgggagcctaaggaaagaagtccttgtgctgacattgaatggtgtagtccagcaaattaatgaggggccagagtgtatctgcattattcttacccaagaagaaaggaagcactttgggaaggcctgcttattttctttcttttcatcttgcaaatatagtacacgggacccttagaggtctgcgctgtataacaaggtcttgctggcacccccctagtagtgtacaatctgattcttagagggtgtttctgtgggtgcatcagcatcccaccaggaagctgctgttttgctgctactgacttggcacacgatcttcacgtaggaggcatccacatcacatgttccattttaattctactcaaagttaaacagcattgcagtccatgttgctagcagggccatactgcagtaaaagtgtgggaaagtaaagtccttgaatgtattttagctttattatttttgttgcgttggttcactgtgtccctatttttttttctttccttccaagtggaagaagacacagaagaaagttcaagatcagggagagagtctgtatccacagccagtgatcagccttcccactctctggagagacaaatgaatggaaaccaagagaaaggtgataagactgatagaaaaaaggataaaactggaaaagaaaagaagaaagatagagataaggagaaggataaaatgaaagccaagaagggaatgctgaagggcttgggagacatgttcaggtaagtcgttaccatcccaaaccagaatctccttaaacatacaggagtgtgagcttagcaaaaagtactaaaaactggacacggtagtgcacacctgtaatcccagctacttgggaggctgaactgggaggaatgctggagcccaggattccaaatccagcctgggcaacagatcattccattctctctctaaaataaataaataaataaataaaagcactgaaagcacagatttgaaaacattatctttgagatcaaccaaaattcttgtataatcttttcctacctcatttttactttgttatggatttcatgttagctattttcagactattttagcagcctaaatgattatatcttgccaaccatgtaaataattgttgagaggtaggagggacatgtctgtatcttagttatgcataagagtgaaagccccattgagacaaagggctattaaagcagtgtttgttcttttttgtgtgtgaacaatggttcattatttaaatttaaacatagagctcaagttagtggtagcatttaaaggttcattaataacaagtctaataaaaaaagttacaaatagagcttcaattaagctgcgttcattaatttagtacttattacttcggtctgtaaagatttcattaaatgtggtctctggctgtttcttgacagttgtttttgtgcccataaattatactctaggattacttagcatatcattttttacaaatcattgccatacaataaaagtgacaagttgttcagaagttgcactgaaactctcccataaaagttcatctaagatgatttataatattcaggcacttaatgttaaatataaagattgcttgattgttccataaattaaacccctaaacatatcaaggtgatggtttaaaattgaaaacatacagcacagccatttgacttttcaaaaagtagttatcctgcattatggatcccctctttttaaaaacttttttttaaattgcaaaatgtgaacaacagttttcattttcatagaattagttgatttacaatcctgaaattgacctccataactcagggaggtatagataagtcagacctggaaagtcgaggaaccatggcccagcctgaaggctacacagctcaacagatgtgttctgtagatgtctgattaagtgcatagaagaaggagagttaactctagacttatattaacacaaagcctggcctatgagcagtattttctttcaatgtgattagatttctgtctctcagtgcttcagaactgtgggattttcatagtttttcattagagtttttctagtttacacagggccccctcatcatgtttcttcattatactctgtgttcaagaatcatataggaagaaattgctctaactgccactttatttcaatttctgtgttagccaagggcctttttgttccatatgtgcagactgacagctcataaactggcacctccacagtgcacagaaataaggctgctgcccatcagttaacatggaaggaatctgtactactgtcttcttcaaattacagggttagagatgggagaaaccttcccctgagacttgtagcccactctctcttccaggggctctcctgacgtcttactgaaagctctaacggcttgttagttttcattcattggccaacatttatctgtttaagtgctctgttctggtcttggagtaaaaaatatacttctaatatcttagaattccattaattataagtgatctttttctgtaacctgcaactccagaagaaagaaaggcctatggtagagctttctatctggggccagaggagcagagtgtgggagaaatgtgtattgtttctaagggaccttgaagaacaccaccacacaactctcttttttctaggagtcctatcaagcattacatgatgctttctctagatcattatctacagcctgtacccataacctataatgaaagccagctttatgataaagaagttgaccctgcatattcttggaaataaaattctatatgcaggtgcaggggctgaaggtttttttttccccctaaaaattaggctgatattctcccagtgtttaagaatgactgttaagaaaataacagacattcatacttttttaggtatgtggaatcattggtttattggaatcagcccaccttggctggtgagagccaattgatcaatttttagaaactttgcaagctggttgtcaaacacagccattattaaaaattaaatacattatctaaaaagcaaaggtaattaatacttgaaatgcatcacttcctaattatttttgctatactttactatgatctctgcttttgaaattatttacatttatggcatggacatagggctaatactatataatgacgactgtgcagcttttcccggccccgtgtttagtgacatcatgctggtagctgaaaatttgccatggtggcagtgtttacaccaggaagtctatggaattccacaaaacagagttcttctcccagcagagcaacatagcaccccacggtgaacataaatacctttgaccagagtggcagcatcttgtctagtgcccctgggcatggctgggttctatcagattgcaaaccactgcgccagccctttcccaatgggttgccacatattgccccttgaatatgagttcagaataatatattaaacacgaaataagcttttttgttattgaatgttggctcttgatccttccttcacacgatgaggatagtcattagtctttgagaagactgttaaagcattgttagatttttcaaaacattcttttaaactaccttccttccataccttctggatctgattgtttgagatgaatataccctcaggttgattcttttacgtttccttcttttttttttttctcctaacaacataggggactacagtaagatttaaaaattggtctcttcctttctctttgttcttttaagaaaactaggatgtggtttccttagcagtgctgcttttaaacagcttaatcagaacatgcatgtgcacatatatttcttagtacggtttgcaagagggttcaagtatggaggaccgtgcaggcctgaagtataaagtaggggtgtgtctgtgtgtgtgatccttttctttctatcttgtagctcagaaaacaaaaggctaagggacattcagtagtgggagtctagttttgtaggtaaatatagcagcacatgagcttgttctctttagtctgcctgaggaagtaatatgttttcctttaaaaacaggctcacaggctctcctccctctaccatcctgtcctacccccatcatcctgttgcctccctgcaactcccactcatacactattcctaccccaacaggttgtctgtgatatttggttaaatatgatgagggtcaaatagataggccttgttttaaaaactctaccagaggaaatgatggtaccttgagtagatatttttagtcattggcatatacagacagcatggttttctgtttgacacattgaatggtagtcacaaagatgatttaattattaataaacagctctaggaaagaatgtgagtcatatgaatcactcttctgtttataaattatggagtatatgaactacaaaagccgccttaatgcaagtcttaaatcagaaatttaaatctataaggaatcaaataacaaatgcaaagtttttcctgtttgtattaatttctcctcatacatactacatcttttgcacacaaggagcttctatcaccttaattaaaatggctttgtatctaagaaacctgagtgtgcttacaaaacaggtaaacatgacttgtaaatgtaatcattctgtgtgcagattgcagagcaaagcggggagcacaaagtttgagtctgtgtatgtttgattctcagacactcggctattcaaatttaatactggaggatatttctgagaattcttcaattgtatgaaattgtcacgaaagaggaaattgagtatgtactttaggaggagggagatatgttttttaatgttttaaatgtgttcgtttttaaaggaaagcagccttcttaagcaacatggttttgccttagtttttaatctccaaattgaaataaccagcaagataataaaatactgtattgtcagatattaagaagttaaaatcatgtgctcgctttttgtgagccctagagtaagtgtaatttgatattgctttgctgcaaaattggaactgttatcgtttgaatatcatagaattgtatgtactctaaaactgaaggttcttagacgtgaccttattgtacatgtctcagatttatttctagctgttgtccatatgtgatagctgagaacctatcactgcagaaagctaaagcaaaagaaatgttgcaatattaccattaaaattgaatcctccaattacatttaaaatgattacctgggtccccgaagcattgttttattcagttttgaagaggaaatagataatttagtttgtaaccttgtttggctgaaatcagatttattgctctcttttcctttttagaatatgatcattttcagaacacaatgaacataatcaggttttaaaaactgaatgtcgtagtttggattatacatcttaggcatttgagaaaagaacaaacacagattcttgttgctttcctcacctgtactaactgtgtgtctgtaccgtgtctctcatttagccttgccaaactgaagcccgagaagagatgaacaacaaagcgattcaaaacatgtcttgaacagcacatattgcacagttgttgttttttttaaacaaacaataaatttacttttaatgaattcttagtggctgttgacgaattttgtttacgacatcagcagtttgatggtttagtaatttccttattaatccatttggaacttttggatcttgatttcaagcttggggtttaaattacgcttgaaaaggcagagacgtgtttttttctctttcctttctttattggccccttttcatagtggaaaaccatagtcctctcactgctggcgtattcagaaatcatcagcacacacccattggatattagaatcagagttttcaagattctgtaaagggccaccacccatttggttgtgttgtgtaaccaccagtgactttgggacacaggcagatgttacaggtgattcagggcagaggcaaagaggtgtgtgggctggtacagtcacccatcagggatgagatgcaacggatagattcatgaccagatggaccagtttgaaagggcctttttggcaaaggtttcagtccctttgtggattacagagtttagaccaaaaatgggtggttggcaggggggtggtggtgtaggaaaataaatttctgtgcttagatggctgaaccagcaggttcttcccgtgtgaaaaaagcagagctactttggcatatagtaatcccaaggtttgctgagaccacgtgtcgagagagcacacactctttcataaatgtttctggaaagagtctgcccggccaagtgttcgaatcacagatccaatgctagtgcaggtggatctccaatggtccttactgtggtttgaagccttctctcttgtaagaagccttaattcacagtttcattattcatggcttcccaggatttgagacagagactgtatatttaattaactctttttcctgaaaatgttagcattgcattcttactgaaaataaacatgggttgggttcattggctcacacctgtaattccaggcacaggagttcgagacgagcctgggccacacagtaaggccctgtctctattaaaaaaaataaataaaaaaaaataaataactgaagtcttgaaaaccatctgataaagggtattgtggattgggttgagtgcctgtgagaaggcttgacctctgctctgacttgaaagcagtttgcagttctaccctcgcccccgcccaagtgaaagccctcagttctagtaaggagacacacagaagagtgtttatttgtcatgctagttttttatgacttggacctaattgccatggggattaatgtgaccagtttcacattggtacatcaagtggcatcctgtgcaatctgctgatgatttaaggaatacagttaaagtaagcacatagaaaacaatgcttctccaaatgaaacacagtgagattttacataattttatttgctttcttgtttgtcacctggacaaagaacagctctgttttgtgattatacaccctgggaggtttccttggagtgagttctgaatttgtaaatcctaaggacttaatgtatgcttctattaatttgaattgaaacagaggttcccatttttaacacaggaaaataaatgtccaactgacctgctagcaaagacaagttctaaggtagctgatatcatattcttcaagtattcttcttttcctggttagcagttttaaatagagaacctctgacatccacagcgcccaggctgaatgcagaggaagctgaggaggcacaaagcatgacggctgggcctctctcagaccttttctgacattctttaatgtttcttttccatagacctgtggcatgaatatagaatgcaggtgtcaaggatgacacctacttgatagtctctctaaagcaaaccttttcgcaaaagaaattcttgacagttctgagatgctaagtcaatttcaattccaggctgtgtggaaaatggaatcttttttctgcaattgatgtgaaaattgaaggctactgactattcactttctaataacacagggtaaataaatactatcgcaccattgaaaaatgcacttagaagacaagctcagctaatgatattcaccacaacatatgttggaaatattccttgtgaatgcttttacttgttaccattaaggttccatattgtttacattaaatataatagatcaagtacatgttactcctaaatgtacttgtatcaagccacaaattagtatataaaggtaattgttttgtcctgacaatcttttaaagaattcactgggggatctctttcctaattgagcgttgaatggttttcttctgacctatgtttaataatagccaatttagaagcaaaagactaaaatcagattaaattttggatcatagtgaaataaccaggtctcctattaacctctctgcttgcagttttttttttttttttttggatggttgatccttttccccacttgcatctcatgctttaagccaagagccaaaccattctggtcctctcttgcctcctgcaagcaattcataattctttctgcatcatccatgactactcttttcttcttgggggggcgggggggtgggggagatggttgaacctctgcccccacctccatcccatgctgtaagccaaggccaagctcccaaaaaaccattctggtcctctcttccctcttgcaggacattgccccaacaatgtttaattatttcttctctcttctaaatccatctgatccatctgtgtctgcctttttttttttttttttttttttttttttttttggagacagggtcttgctcagcaggagtacagtggtgcaatcatgcctcactgcaccttgaactgctgggctcaagtgatgctcccacctcagccttcccagtagctgggactacaggcgtgcaccactgtgcctactactttttaaattttatatagaggtgggatctcactttgttgaccaggttggtctcaaacttctggcctcaagcaatcctctggcctctgcctcccagcatgctgagatgaggcatgagccactgcccctggcattgctcttctctctacaggatcattcacattgttttgcaccatgctgttacctcctccatcttagagaaaattctctcttagccctacttactctccaactacgatctcatgtcctcttgcccaccacagcagaccctttgatatatttgctgtctcttttttccgattctctcttgaacttgcttcaatgaatccttcaccccttccactcagcaaatcctgttctcgtccaggtcaccagttcctcttccttgggaagtcggggtccattttcatccctcatcgtggtccactggcagtacccagcatgttaatcatggctctcctttgagaccaactttgccagctttccctcctcctccctggcctaccctgtcttgtctcctttgctaattctgtgccatactctgtcctccaggtcttgtgccccaggtgctcagtccgaagtccttttgttttctctttttggtaacacagaattttgatattctcaggaaacagcctttgtgatccaaatacagcctataggcagatgactctcaaattcacctctcctgcctggacattttcttggaactcttcatttgtagtttaaccatcttcttgacacattcacttggagatcaaccagacacttgaaacttcacacgctcccaactcactgctggattccccctccccgcaaactgctcccgcgagccttccctttctcagataatggcagttctgtcttctcagttggttagatccaaagctttggagtgatccttgacacctgattttcccttatgccccacaagcagtttaagaatgtataaaagcaaaagtccattagctctgtttttggtacacatctgcaatcctacttttcagcccccagtgccgctgttactgtgccccagtggtccaagctctgtgtgccctcttcctggcttaggcagtagccctctcactgtgctccctgcctcaacccctgcttcctgcagtttattctcaccaccacatccagaagtcacttttccctcctctgttcaacccccagtagccttcggcaccactcagagcaaaaaccaaatccttagggccctacagaacttggtcccccaccccagcctctttgaccttgtccctaccgctctttccttcagtaactttactcttccctgaacctaccgggtccactagagccttttcccttgatcctgcctctacctggaatagccttttctcaggtattcctaggttcactcttgtacctttaacatctttattcaagagtcagctttttagagggtctagccaaaattgcaaactctgctccctctcaccctgacacttttctaacccactttttggcatcatttttcacatttgcactcctacctgagctatgatagatcccactcatttgatgtaaatatacattgacattgacagagaatgttaacccatttttcccctgctgtatccctggcagactgcatgatgcgtccatcatcagtgcccagtaagtgtaacagatgcccattgccaaaccccttcagtggccattctctgcctctgtgtctgaggcctctctgaagtcttggaaggcagctctgtgtttccatctgtgcctgctggatgtgcccaggaataacaccttggagcagccttcaacgccagtgtaaatgtaccccagtctccatggcccttgggtttatagcactaagtcataaggtctgcactcttcaccctcagaccaggagcttgttggaaatgtggaatcccaggccctgcccacatctgctgacattagaatgtgcagcttaacaaccctggggattcctgtgtgcatttcaggtcgagaggcagcagcccctaccctgctcccagagtttgcctgtggggttgtgttccccatacccacagtttcacaggctcggtaacatccctttgtgacagcctttcctccccactgtggcatctccacttctctcccaagtgtttcttcccttaaaccactgtcctgaatccttgtcccagggtctgcttgtgattaaatccagactaaaacagtgttgagtgaatgaataaataaaacttttgagccgggtgcggtggctcacgcctgtaatcccagcactttgggaggccgaggtgggcggatcacgagttcaggagatcgagaccatcctggctaacatggtgaaaccccgtctctactaaagatacaaaaaaaaaattagccgggcgtggtggcgggtgcctgtagtcccagctacttgggaggctgaggcaggagaatggtgtgaacccaggaggcggagcttgcagtgagccaagatggcgtcactgcactccagtgtgggggacagaacgagactccgtctcaaaaaaaaaaaatacttttggaatcagcggtgaatagtgtatgctggaaacttctgttgggggtaattttgcaatttatgacaagtcttcataccaggacaatgctggcgttcccatctttggaaggcaatgtcactgccgtctctgcctttgtatacgtacatacctgtgactgcacacacagtccccaaagagcagcctttcatgctccatggatctacgtcatggtatttgaattattgttattattattttgagatggagttttgctcttgttgcccaggctggagtgcgacggcacgatttcagctcactgcaacctccgcctcccaggttcaagcgattctcctgcctcagcctcccgagtagctgggattacaggcatgcaccaccacacctggctaattttgtaattttagtagagatggggtttcaccatgttggtcaggctggtctcaaactcctgaccttgtgatccccctgccttggcctcccaaagtgctaggattacaggcgtgagctgccacgcctggcccggtttattattgaagttcttttattctgctaaaaatagccatagatgatttttgtaaattaaaaaacattaattttgattttttttttttgagacattcttgctctgtcgcccaggctggagtgcactggcgcgatctcagcccactgcaacctctgcctcctgggttcagtcagttttccctcagcctcccaagtagctgcgattacaggcatgagccaccacacccacctaatttcgtagagatggggtttcactatgtatgccatgctggtctccaactctggacctcaaatgatccgcccacctgtgcctctcaaagtgctgggattacaggcgtgagctaccgtgcccagcttaattttgaatttttttaataaaaaaatttttttagagacaggatcttgctctgtcacccaggctggatggagtgcagtaacatgatccttgcaaccttgaactcctgggtgattctcctgcctcagtctcctgagtagctgggactataggtgcatgtcaccatgcccagctatttttttaaattttttactttttgtaaagacacggtctcactttattgcccagggtattttcaaactcttggcctcaagtgatcctcctgcctggcctcccagtctactaggattgcaggcgtgcaccactgtgcccagccatgatttaagtattctctacataagactgtcagaaaagataattatgattaccagattaaacattccatgttgggaaattccctgttttcaggctgaggattgtatagttgagtggtgatagatttaagcaaagagttcgtgttaaaattgccctttcatgtctgcctacgcctgaaaacgtcagagtctaggagttgtgtaagattctgtttctaaagaagtcaaaactggttttactccttacaagctttgtgggcagctgctgcagagcaaatgagcaggtggaaggcctcccttctgaaggccccagccatgggccacttacagacaacctctgcctcgcccactggaggcgctctggggtttccctttcactaccgctgctaggtatccacacatttctcaagaggcaccagggcccagcccatacctggggcctggaatctgaggtatgccttgacaggctgatgacaacctcaccttcttagtttcttctcccatgacatttataatatttatattgtgccttccatttcttttataatgacaatattatctaacaatgttagtctttttttaaaaaaaggaaatgaagaactttacagtctctgctcatacaaaggaacagatactttgaaatgaactgaacagatactttaaagtgatggaaaccaactacaaaatttttctaacttgctatattaaggtttctcaatttccactctcctggctaatttagaggatgatctattatcagtttttattccatttctgattttgtcaggtggtatgttggtcattctgactttttaaggcaaacaataagctatttctcatgtagccaatactgtggctagcagtcagcattcattcattgcatgttgatactggtggacactgcagagaacattgttttcaataacccctttacacctcataataaccctataaggtactaattttagccctgttttatgaatgaagaaactaaaacataaaggtgtggagaagaacttaccaaggtcacaaggtaattggtggtagagtcacaccgaatttgaacaatggtcaacctcaaaggccgtgttcctaacactctcctgcaccatctgagccgtcttacccttccgggtaggttttgccacccctaaaacctatgtgggagccaagattgctatgcgacatggcattgctattgtgagtgctatggaaaaaagcactcacatgttactagcttggaaatgcagaagttagtattttttgaacctgactttcacgttttattcctacttgatttctatagctttctctgtctatggtctcttctcttcccaaaataattcttttttttttttttaattttgtagagatggggactcactttgttgccctggctggtctcaaactcctggcttcgagtgattctcccacctcggcctcccaaagtgctgggattacaggcatggaacacaatgcctggcaccaaaataattcttaaggatttttactgctaatgaaaaacttaccagctgtctcattcctctccctcttcacagactctcagacctgtctgtgtaggtgcgatggcagccatccctgctccagaacacaaacgaggacgattttaaaacaatgccctctttcctccggctctcttccttctaggtggctctgtgctgcgcattccctgcctcttcctgttcccaccctcattttcccctttccttactgcatgccaccttgtacctctatcttgctccaccattgctgcctctgatttttccctatcaaaacaattatgaggtcttttccgcagactgtgttagcagtttttgcatcctctgctcattcctctgtctccttgtcttcctctccacctcagcccatgccctgtcagtgccgcccagctcacaattgcctgatccttggtgggtacactggctcacctctcagggctttgctccttgggaggctattcaagctcagcatcacctgtctcacatctgtctgggatcctcaaacctgacctttgtaaatttccactaactgaagattgtagaggaaaaaaaaaaacatcttatcgaattcctgctcttatagctgattttagctattaggaaaacatcccaagttgagcttttctattcctagaatttcagatttctttcctttttaaaaattttatctccttttatagtagtaaaaatattttccttttttttttggaatggaggtcttaagctcagtgtcaaaaataaaatcattttcttaattgagaaagtgatgacatctgtttaatttatctcaggatatcttgattctggaacaattttgagaaagtaaagtttagatcaactgcaagtaggtactctaacaggatggaaattttccttcgatgttctttctaggccgtagcaatagccagttgcctgatgttactttgagcacagtggcaaagcattgataatcacttaggcagaacacattcacataaagttttacctgccttgcacaaaaaaaaaaaaaaaaaaaattcacctgggcagtaaaataaattctgagggttttatttttcacctggcaaaaatggtttctaatgatgggcaggtggattttttttttttttaaaacttggttttggagcaggtgtgatgattttagtaattgagaggtaaaaccatttgtttcatacattcaacaaatatttactggagtgcctactacatccttggcagtgttagaggtgttggggatttagtggtggatacaggagacgtggcagtcactgagtaagtaggtcctgctccagggcctcgtgaaagggagatggggacattgtgggaacttgccacaaatgggcctagcgcagactagaagccatctgccttcttctgaaaaatgacattaaaacaggtctgaaagaggttttgacttctttctctgaactcaaaggggaaaaaggagtgttttgcagcagtgggatttaaccttttttgatatcatctgtaagaagaaatacatcctaccttgcaacctcgtgtacaggtatgggcacagatagctaaagtaaacatttcacagaacaagtgatacctgcccttctcagtgtgatggagtgtgatgtatttattgagcagcagcatagggtagtggctaagaacctaaactctaaatttagatgtcctgagttcaaatcccagctgtatgctcaccagccttgtgtgtggggccagttaattaacctctttgtgttttacttttttcagttgtgaagtgtggataataatggtacctgcctcacagggttgttttgaagctaatgggaattaatagatacaaagcattttagaactcctcctggtacaaagtaagtactttgtgggtattagctgctgctgttgatactaatattctgcaattcattttttttaaatggtaagtaagtgccactaaatcaatttcaggtcttcagtgagttccaaaacaaaatttgaaaaacaccatttagatggtggaaatcctctcggtttgcgagggtgggatgaggaacctggaggcattggagaggcaggtggcctctcataaatgactcgatatggcttgactctgctcctaaagatagtgggtagccattcaagagaatagcttgataaagtttacagtgtttagaaaattaaaagattcctctaaccacagtgtgtagagtgaactgaagggctagaccagagtgatgtcaggaactgtgaggcagcttttgtaaaaattgtggccagtgatggaggtagccgtagggacagagacatatagatgtatttctcaggtagactctaggggacttgcttatttgatttgatgttaaaaaaaaaaaaaaaaaaaagaaaggagaaagaacaataagaaagaattgccacagttttagcctggtcagctgggtggatagtcacacaccggctagtaaatactggaagaggatcctatttggaggacatgtgacatgttgcatctcataagcctgtgatatgtctacctggagggaactggagggtggaagagggggaagggctggcactgtagagatttggaaatcaaagacatgtcaggtggtgcttgcaaccatggcagtgtgagtgaacagatggtctgggaagtgcgtatagagggaaggagtaatagaaggtggccagagagagttctaaggcccctttgaatatcactggcgctcagggcaggaatggggcagaggaaggagctgttggtaactgagaagaggccactgcagagagaggaggaaaaccaaaagagtgcagtcactaaagccattaaagcaaggatgtgtttttaattaattagaatgatgtggtcaacattgttcctgctgagaggtcagaaagtcctcctggtcttggctacatggagtgattagtcagtaggtgtcaactggacctattttgaagggttacccagcactctgtgatatacttgaatatttctatatgatgcaggtgtggctagcatctctgatgctaatgcttgttcaagttgagaacatcgcatatccctgttttaagaagcagagcttttttcgtggcactgtgatacaaacacaagcgcaaaacctgtgccagatttccatagtttttgagcaatagaaatgaccttttaggtgacattaagtgaatcctaattgcagattctcacaaaggattgtagctattaggatataaggaattaatttgtaagtacttaacaaaagttgcaggaaaaataaatttggtgattgattttgctgcctgtaggatcacttcttaccctccatggtgagagactgtcattcactgtctctgcctttctcttgtatgttgggagttgtcctgctgaacacgaccttcctagagctatctgtgggttaaggatcttcgtggcattagctactctaaattagctgcctagttccagtcttctctcatgcttacagaacaagaaaagtacttatagtcagtaaattgttttgtcaaagtccaagctttaaaattgcccccagccctgccatttttttttttttttaaacaagatcttgctctgtcacccaggtcggacaggctagagtgcagtagagcaagcatggctcactgcagcctcctgcctcagcctcccatgtagctgggaccacaggcatgcacattcattcattcattcatttatttgtagagatggtttctcactttgttatccagggtggtcttgaactcctgaccttaagtgatcctcccatctctgcctcccagagtgttgggattacaggtgtcagctaccatgcctggccaaaattacctttttaggaagcttttcttttccaatattgtgacatttaaccattataacacataatcaggagcccccactatgtactcacatacatttccagactgtgttttcccagggtttgttttttccaagattcgtgaatgcttctattcccatgacttccaaaaaaattgtaatatactatgatttgtggatatctttgtttttcagggcaacagtgtccatctttcatgtctatccaaagagacataaagtccttggtatgttcaaactattaatgtgaactttttatttgtacatgcatttttaatttcgtgagtcactctgtgtatgatgtactctccggttattgcattcggaaacattttaactggaattatttctgaaagtgtatttcccaggaaagtgtagacttatatgtttttcctactgtgacacaattttgattttcttttatattttcagtaataaagtattatgaactaattattatttttaaaaaggtagaccatgtaaccagttagctattgtttggtaattttggtaatagttagataccattacagtctttaaatgggttaccactaagattttatctttcttaattttaatgaacaaacagaaaaatttatatagcatttttcctgtggaactcctttttcagaaggtcccacattcaaattagttttatccatgcaggtcttattatcttttattctcaaagttctatgctttactctttggctacactcctgtctatctgacagaatttctttaagcattatttatcttgtaagacagacattctctgagtcataaaagcaacatttttatccagtttccatttagtctggtcagcaaagggaaaagacctctccctttagaagtgtcttccaccgttgtctatacatacagctggtggacagccgtctgattagagagaaagctcttattaacagccaacataatagaaagtgcatgaagccatcaccaactggagagtacccaaatagcatcagaaacaatgaagagaaaatgaaaatcagttctgactcatggattgttgttttccttttgtcttcagtactgacagtctttgtcagctggaatagcagccttggcctgaatatctattggtgtttatttgcagttgtctcaattagttctgctcttagccttttgggaggcactgggctcctcctcgcactctgttggccactgtgggttggctttgagggtgccatcctgacaaaatcagttgttggggactataagactgaacaagttaggtattgatctgaagatgggagcatttccaaagatgttacaaaggatgtattattttctctcactgggaagccaaatagatgaaagcagacactccttgcttgcttatctccatgccttgatctgtaagaaattgtcttggttgtagcacagactcaaatacttgtggcttaaacaagccagagttttattttctctcattaagtctggggattggaagtccaaagatcatatggtcgcctcagagtgttgtcagcatcaccacctcctttttattcaaccatccttaatctgtattttattgttgttatcattttaaatcgtggtgaaatatacctaatatttaccactgtagccatttttaagccgtttagttcagcagcagtaagtgtgctcacgttgttgtgcacttcaccgccaccattagtttctagaacgcctttcgtcttgcgaaactctgtacccatcagccgctatctccccagttccctcttcccccgtccctggaaaccaccactttactttctgtctctatgagtttgactacttgagctacctcatataagccgaatcggtatttatcttcttgccattgattgatttcacttagtataatgtcctcaaggctcatccgtgttgtagtgtgtgtcaggatttccttccttttgaagctgagtagtattttattgtatgtatatacgtcattttgtttatccattcccacgtcgatgcacgctagcggttgtaataaggctgctgtgaacgcgagtgtcttaacatgtgtttctatcctcagtgtcacaactctcagagttacaactctagctaagtcagcttctttctctggatcttttccagaagtgccactcatcagtttctgtgaaccagaaattaaggataacaatgataataaaatagctcatatttatttagtgtttttatgtgccaacacacagggctgaataattcatttcatcttcacaataaatctgtgaggatggttacattttaccaaagaggaaattgaggtttaaagaggttaaatgagttgcccttcacagccagttaacagcataatgctaggaagaggcagagctggactttgaacccaggattctggctccagaggccatgctcttaactactgtcttttatcttcagctcctgttttcaagggaagctggggaatgtagtttaaatcccgaataggtacatttcctctcccagccacatcagggttttactagtaaggagaaagaagagaatggatgttgggtgagcagcttgcagcacctgcctctctagctcactgctctgaagccaggtggcctcgggcctctgaaagtgcagctgctttgtaactctgggctgctgtccacccttactttattgtgctggccaagactaaccatcactggccagatcattttcatttaaccaaaaagacccacaacagaccacaaatgatggaaaatgctaccactgaaatggtcgtgggcttccaaactgaggtagactagagtagctacctggaaatggaggaggagatgaatgtttagatattcttgttaggaaatagtgtctgttacatattcagtgatgatttctgccagcagtgtgctacgtgttttaaaaaatgattgcattttatctttgctattactattttttatacagtagttttattataatttaatagtgccagttatcacacatcaaataccccaagtctttttgattttagagttaagctcttatttatttacttacttatttttttagagacagggtcttgctttgtcactgagactgaagtgcagtggtgtgatcataactcatcacagcctcaaactcttgggctcaagcaatcttcccacctaagcctcccgagtagctaggacgacaggcgtgcgccaccgtacccggctaatttttgcatattttctagagacgtggtctcactgtgttgtcaggctggtcttgaacttctgggctcaagcagtcctaagtgctggaattccagttgtgagccacaacacccaggctgagtgaggctgtttatcatggtgttttaatgttggttgtagtgacctaggtgtctttttagtcttgtgggtcttgtttgttggtcagttggttggttggtttttaagagatggttttgctctttgcccaggctgttctcaaactcatttgacctcagcctcccaagaatctgggattataggaacatgccatggtgcctaactctcttgtgattactttgaaattatcccccaaagtattcttgttctagcatgttagatcttgtcttctgggacttagatggaatgctttgatacttttatatctgatactttcaagcccatccaccatcagcatgtactgattgttactctgtattgagaaataatcacatcatgcattttggtagacgtttaagagtccaaattacatttcccacatccacgtattttatagtctagttaaagattcttacatagtgatctttataaagttcattttaatataattttagtataataaataatgagttggtcaggtatgagctcatgcttttaatccaagcactttgggaggccgagacagggattgcttgagctcaggagtttgagaccagcctgggcaacatagcaagaccttgtctctacaaaaaacttaaaaattaactgggtgtggtggtacgtgcctatagtcccagctactcaggaggctgaggcggcagaattcttgaacccaggagtttgatgctgcagtgagctatgattgcaccactgcactccagcctgggcaacagagcaagaccctgtctctagtccaacatgttctttgtgcaaaggctaatagttgggccatcaataacttattttaaaatataatatagtttacttcatgaactcttaatgtgtaaatctaaatgaagaacctagtcattgaaagcagtggaggtaaatcagagagagataagtatactgtagtagagagaatttgggatttagactttctagccttccctgcccaacccagctagctcagccccatcctgccccactgcctctggcatttaaacatatcagcctcagttttccttctttccgcgttcttcacatttaattttaagaactaaatgaaagaatgggtatggaaggcttttgaaattttaaggcagggtacatctgtctgctcatgttgttcactaagttcctcttcacagggttttctacccttaacttaattatgcctgaattatttcctcaatagagtctctgaactcctttgctaaaaaaagatatataggttatttctacccactgagatttgtgtatatactgtccccagtgaagtgagttttgctaatacgtcatgagtatacacactagtttagacaagatagtttccacctgcagccagggaaaagcaacataatgatatcctgcaaaagcagctctgactggaggagactcagaaaatgagactgaaggcaatgatgaagcattgccttcagttccaggattccgtcttggataaacaggatctgcttcccccagaactttacccttgcttgtgatggccagtgagcctgtctagggactgagaccacacagcaggcagtgcagacgtgacagttctgagaagatggaaatgggatgagaggaattccaggccagtgcacaaatcaacaagttgtatatttggacgcttgttgaactatttggtcaaataaggaagaatgtggaggtttgacatttgccgaatttcttgtcccttttacatgagcagcattcagactggagatgagacaacacatctccgtgttctgaccccttgctgcttcacccaccccaggatttcagatggtttcttaaccacagttgagtcgtaaataatatttagtgctgtacatcctggtagagagaaaccacagcacaaagagtgaaggatcttttctggaagagagccattgacattttttttggtggctcgccatcattttctgtatgtgttttttaatttttgagtttttgtggaggtggggtgtcactatgttgcccatgctggtcttgaactcctgtcctaagggatcctcccacccctgtctcccaaagtgctagtattgcaggcgtgatctaccatgcccagctttctctgtgtgttaaactctccaggatacaggcatgctgcacagatggtgactttaagcaaatatgtgacctctagtccctttttcttcaaaagggcattgtgacacaggtagatggcgggtgtttgcctcttgacttgaacctgctccctctgtgggaatcttttctttcctgttctaagaattaggtttagtttccaattcttagcagtttttccacagagccctttattgggccttaaaaacatgtcagctccctaatgtagaatctgaatatgcgaattaacttaaagataaataaaaagaaaatctgcacctcttaatttactctgtagagagcattcgctaagaaatgtgaatcaaaaggaattgtttcctataatcaacagaaaaaagtgctgacggtcaccttaactttacagataatgagatctttagggaagctttaatctttcaaagtttccagaagctatgcaaagagcctggggcttccccaccaccaatcccaaaactttaatgatcacattatttgtctgtctttgtgactttcgtctgctctatgaacatacaagggtaagaaaatatttgaaggtgtttccgttgctgtaacgtatgtatgtgtatcacttcctgtcagtagttgaaacatagaatttgaatcacaatgcatatttaattgagggtggatgtttataactcaaacaaagatatccttaccttgtgcgtgtgtttgtactacctcataagcatttacaacctggatagccatttgattaagtaggcagatggcaacccgaattattatctttgttactgaatacctcctgttgtttgtcctagagaaaggtgtgtagtgaaatatcattccaccttttcctttttcttccttcaagtgcccttttaaatggatgtgtttttgtgacttaggtctcattagcatttcttatggggactgccttcagggcagtaccacttactaaattgttcccttgctttaggaaaaggaaaaccatggtaaccagatgtagggtatgattatttgcctctgacctggcaaagtgttgggtttaacaaaagaagcttaatagaaatgttcaaattgacccttctcatcacttgagctgcttaaagctcaatcaatctctcattattatcagagttatttgagcaaaggcagcagtgatagtatttttcataatcactccttgagccaaatgtaatttgcaatttgtagtattgtattatgaaacaataatgcattaaaatgaacagcacaagaattaggaatatagtcataaagaaaggatccacagaagtagttgtgtgaaagacactctccaaatcattttaagtggacatgaccgatttcaatgccaaattaagcatttagaaaaatcagaattctgtgcttttactatatttaaagtatatatatagtatgtttgtatatattttataataacgtcaatttagttgggagaaacagaaatataatgtgattattatttgcatttgggtatttggggttatggggttagtgtggtttgattacctgggtaggtataatttgaaaaaaataaagtgcatcaagccaaggtatatcttttgcaaagagggaatattttgccgcagaaattatgtcttcttgtctatcagctagttgatgtccaaaaagcttcagcatcataattaagatatgctttcactcatcttctttcattttactagaatggctgtaagtatagattatatgtattatttcagtgatttgtgtatttatcttgtgttttgaaggattactgtgtttgcttttatttctcttaaatctttatatttgagtcccacagttttttgtttatttgtttgatttttagatctgtggagtttgtggtgattcttgtaaagtcaaaattgattttgtgctcggttccctttgtcccccctatttccaattcctcatctattgctttaatatttccttgttccatatggttctaggacttctgaagtgtcaggttacgaggcatatcagtgcatccttgattagctaacacaggctatgctggagtaggagtgcacttataaggacatttaatgggagtcctgaaagggatatgttattcattaaggttgcattgcacatttaaagattgttctagcttggttaagtagaaggtgctttttctttaaaaaaaaaaataataataataaagttacctctttttcccaagatgccaagcaatacaaatttattttatttaaatctaatcagattggcactgatgaaaagtacacaatcaaataattattctcaagtttgtgaatttccttttaaagagaacctctgccaaactccaccaacttaaaacagcatcctgtcttacaaaagcgctatcaagttgtcacgtaccctttctaaggctcctctctcatcattgttgattaccaagatgcttttttgcctaaataggagctttctgcttttcataatcaacctcctcttcgctgattcatccagcattgccacaatctactgctgagcaaatcagtactctttcatggtagcgatttcttaaaatgacactaaaatatgtaagatcctgtacaggaaggacatattagaagtgacttattttcttttcctttttcccatttgtaaaatggaggctgaggtacaaaaaatgtggccagaatccatgagcatgtcattacaaatgataactgcatgcagtgaattccttgttattttaccctctgaatgggtttgggcagtttgacgtgcttctgctgttgcctgacagtatttgcatatgtcagcacagatgattttgacatttggagtgtcactgcatttagaaaggttggcaggatcctgtgaatgggtatgtgggcagtttttctgatcttttgcaatgattaggagcagttcctgaccttgccttcaaatccctggccttccgagataagttctattcaggaacaatgtcctttggacctaatttccaccggcaatgcaagatttactcattgattgatggtggagagggtagcctcgctctgttgcccaagctggtctcgaatccctggcttcaagtgatcctcctgccttggcctcgcaaagtgttgggattacaggcatgagccagtgcacccagttctatctcatgtatttaaacatagatttattaaccagctactttcagtatgagagcacagagtcactgtctttggttcctaaagcttatgaggtgtctggctgtggtaaaaagtgtcttgggtatgaattctagctttgctactcactcactatatgacctaacaaatccttcaagcccctgtgcttactgaggtttcccctaagcatgaggatgataacacctgtcttgcatgctggttgtgggaatcaatgagataaaagcacataataagaattcaataaattctagctaagtgtaattaaataatcaaaagaacattcaacaagtgcataattatgtctcacttaggaattacacaaagtgaacttcataggtcttggaatttcattttctcttaggcatatccaagttcagaccaattaagaccttttaaactagctacaagctgaactgaacccttgtcctagcttgcagtgggatttttaatctttgattttcagaaacatgtggacatacatcttcagtgcatatggacaagagtgtagtaggacaatctacaaagatatatggctagattttttttcctttgaataaaatctatagcaattacctattaggactttaagcaaaagtaagtttgttattgtgttagagaccagggtaattggttgagggaagttagttctgcaccaagaatgtggaaaaagcacaagaatcaattaaaagtttcccagagaaacttggatcaaaaaccatttaggtgatgtatgactcagaggaatagaggaatgatatgaaaagttcatgggtttgttttgatttgagtgaataatgtgctctggactatgcagagaactggattgagacacaggaatgacacaggacagggtatgtgcttttgctgtacaggatcttgaggccagctcattgggcagctggtatctctcaaggatctttaggacaaatgacagcattaccacagctggccatggtcaaagacaggttatgcaatggctgtacaaacacatggtcttcaaaaacatcaggaaagttccagaaagaaaaaatgaattcctgaagaaagggacagaatggatcatgtgatagtgcaaatatgtagaaatgagggtcagacacaaggcagaatactgaactagtgactatattgaccacgccagggcaggagttgggcatttgcagaggatatgtggcttctggtagctgacattgaactcatatttgattcattttaaattctcttccccagccaagcagtatcacataacctacaaatttctttgggtaaatagacatgcggtgtagcaaagacttcttagacatgaagacctaggtaattagcagtgagaaataacagatttctaggtgacatttcagtggggtgttttgaagaaaaacttattttaaagactattgctaaaccttacaagataattggttccggatattctgttcatctatttttaaatatggcagcagatttttaagacttttttaaaaacactgtatcatgtttcaaagtatggtattaggaaaaacacattcattacaaaattaattgtatttttatttatcgcaggatgctatgcattattattccgtgtaatttttttctaaagacctctaattttggtagcagcagaaatattactatttaaatagtaaaatatttcaatagtattcatactgcagagagaattatgttgctttgctgaaaacccaaatgatggttttaatagcaaggaaacttgccagtagttacttttcaatgacacttatttcattataaaaacagtagaatttgttgtcatcctttgttgtcattttgtttgctttttgctatccccattcatcctccagttcaggttttgtccatcattgttgactgtaatggtacatatggctgatctggcagacagcagtgatctcatttgtaacgcattattgtaaaacccatttagcagattagtttgagattacgttagctgaatgaagacattgctgtgtcctttatgaagaaagccatacatttaagacatgttagaatcaattctgctctgaataagacaggattagctcactgcatctttctgtgaaggagtttctggtggagtgtggcatttttaaaagtgtaccttcactcctaatgcagcactacctctaagcaactaagcaatttttcatttatctcaacattttaaaggtattttctttttatccctctacttattattattattattattattaagatctggccagatgcagtggctcacgcctgtagtcccagcactttgggaatctggtgcgggtggatcccttgaggccaggagtttgagaccagcctggccaacatggcgaaaccccgcctctactgaaaatgcaaaaattagccaggtgtggtggcgcacgactgtagtcctagctccttgggaggctgaggcaggagaatcacttgaacctgggaggcggaggttgcagtgagctgagattgcgccactgcactctagcctgggcaacagagcaagcctatgtcccccaacaccctcccctcaaaaaaagacccgcagggacaatatgggaaaccgcatctctaccaacaaaaatacaaaaattagctgagcatggtaggtaccatgcacctgtagtcccagctactcaggaggctgaggtgggaagaaggcatgagcccaggaggttgcagtgagctgagattggattgcaccactgcactccagcccgggtgacagagtgagaccctgtctccaaaaaagaaggtcgttcttctattttaatatgacttaaggcatgactagcaaattcttcctgaggtaccagtgtaggtggccactttacctttcagcctgacacctgctgggtagtaaagttttctctttgaacgtttgtgtgagtcagagcagattgcaaaactctgattctgtgctgagaatgggtttggtcctggagcaactattaacacagtatttcttcagctatgctgtttcttggaaggtggctcatctgacattcatccatggcttttaaaagataacatacaaataattgatatcttccaggtttttgagcattttgctattaagtgattgtcttcataggttgattgccaatttcagctgtgaaactgtctttgcgagtatatgtataggtgaaatttttcaatgactccctccccttttcaggaattaagcaactataaattaggaagtacagtaatattggctattagggtgaatatgggtatagatacttttttttcttttttacattttagaatggctagtgtattttttatttacagttgatttcatttgtcagaatattacagctgtgagtgatccatttttgtcccaattataaagtaatatgctgtgattttatagtataccttaaagaaatcacataatttattaactaaagcaattactaaaagaaatgtccaattctgacctataaacgttttacatatggtttctttaattttcatacattcatcttgaatctgtattctttttttgagacaaggtcttactctgtcacccaggctggagtgcagtggcacaatcatggatcactgcagcctccatctcctgggctcaagcagtccttacacctcagccccttgagtagctgagactacaggtgtgtaccaccacacccagctaatttttgtattgttagtagagacggggtttcatcatgttgaccaggctggtcttgaactcctgaccttaagtgatctgtccacggcgacctcccaaaatgctgggattgcaggcatgagccactgcacctggccaaatctatactcttaaaaaaggaaagtgcgttataacagtttggtaatacatttacaaaaaatagttattccagtgattagggggtggtctaggaaactaattaatattttaataccaaacacagtgggaaaatatgcaatccttaggtatgaatcaggaacctactctttaaaaaatgtcatacgtacttaagagaaaaagatgaaggttgattgactgagttcatatatatatgagactatgtgggcaaactgaaaccttcttaacaatgtaggaccaataccattttctacaaagattttaacatagctaattaactcaacattagcttttggctgaaaatatctacactgttttaaaacttgcaaaatcaaccaatctaaatctttcctcaccattactaaaggagcatatgtacactatttcttaaagactaaactgtaccttttggtacagatagagagtagattgttctcggtgtcacagcatggtgtttctcaattatggtgcagagttgtatttctatcttttgggatgtaggaatgtgagccagcacaatgtcttaaaaatcagtaagtcaacatggcaacattgtatcatttgaaagatttatgaacagaaacactaaatggttcaaatggtttaccttcggaatacctcattataagtaaaatgatgtattaaaatttgaacttatacttttctggaagttaggatttgtacatcttatacttggagatgcctcagtgttgcagaacttccaggatgaagtgaatgccctggctttaaatgctgtctgctgacactcagattaatccatcccgccttatgctgtcccttgaatttttgccgttatgatatcttcacccccaagtcctccaaaccttttccttccctggccctgtatatcttgctggacggtaactcctttcttccagttgcttggctaaaaccctggaatcatcagtgactctctttccctaacgtccatgacctccccatcagcaaattttattggtgctgctgtgaaaatatgtccagaaactaagcacttctctcactgtcctccattaccagctggttcatcaccatagcctcctgaccgttctccctggtttcaccttttcacctgcagttcttcacatgcatccagggtcattaaaatgtcaccagtgctgctcctctgttccaaatccttcagtggcttttcatgtcatctcagtaaaatccaaaatccatgtggtctgccccctgatgctgctcttcttcatttcctgctgccttctctttttctctcccattctagccctatcactggaataggcaagaatggcccttgccattcctcaaagacactcagcctgcctgtgtctcagggccttggcacttgcctgctcctctgccttgctgactcatgccaatgtggctggctccctctagctcagatctctgctcacatgtcgacttaggagagaggccatcaccctccccgtcagtcctggtctccttactctgctttgctttcccccttagcactgtgcagtctgatgttgttatatgctaattcgttacctgagtataagcagtagaagctctatggcagttgaaatgacctaatgtgctctgtttactgtttatagcctgggtgtcccaaataagccctgactgcatggtagatgctcagtacatttttgtctgatgaatgagtgtgaagttttagttgttgacttctcctgagatgtatcagtttttaatattttttcatttattcattcattctgtaaagcccatcattatgtgtaattctgaggcattattgatatattgacaaaaatagtgcaaagtcttttatttttaatgttttgtatttattagttttaaatgcatagcatgtattttataccttgtgaaatgtggtcagattctggatttcagttctggagaattttctatttttcttttttgcaactgcagtgatcaaaaatttaattttaaggatagatttgctttataaagttaatttacagtcagtttttgattactgtataataatatatgtaatttttaaagtagtggtggtggtgttttaccttttttctgttttaacattttaagaatactttcctttccatatttagagacccctttcaaacatagtgttactttaatcaacagatgagatatgcccacatatactttaattcatatgtagacaagtattggaaatcagatttgtattaataaaaaaatcaatgctatcaaccaagccattaatagaaataattttttctcttttatgtcaactttgggacccttttctcctctctgtttctttctttcttttttttttttgaaataaggtctccctctttttcccaggctggagcacagtggcgcaatcacagttcacacagcttcgaactcccaggctcaagccatccttctgcctcagcctctggagtagctgggattacaggtgcacaccaccacacctggctgattgttttggtatttagtagagacgaggtctcgctatgttgcccaggctggtcttgaactcctgagctcaagcagtccttctgcctcagcctcccaaagcctcagcctcccaaagtgctagaattacaggcgtgaaccactgggcctgaccctctttttcgatatgaaattgtcacagtacgccagattgatgttattcttcagaaagaaatactcaatatactttaattatttctgaatgcttagttgtgtgactgtctataaaatatttcttttttgaaacatctggtgaccagtgcattacagacaaagattgcttatggatatagagtgcatgcattccaggcaatatggtcttttatagagaaaaataacagagcagggaaaggaattgataccaagtttgagtatcaaactgggatattttggatgccagaagagaataatgttagtgttttcttaaagagctcagcacccatctgcagaaacttgtgtggactgtttttcaataatgggtttgttccgtgtgtttgtttttgatcagatgtggatttataagtcatagatgccacattcagcaattgctttttatcacatttaggagagtatttgatgagaataccttaaacctttcaatttaattaaagtgcagtgtaaatgatctgttgtactttaaaccttgcaaacatggcctttgtcagtttttaaactatgatgaatgtttccaataagcctggctgtgaaaataaagaatagttgtttatggaaagattattaactagatgattgtggattatcattctttagtcctaagaaaaacccactccaatgcagatctttcttcctctagcatctaaagtattcagcacttagtcctacagatgtattaattgtttaataaggataaaccacaactcttgttgtttgtttttgttttgctaaaggaaaaactgctattgagatcatttccctcaagagttttctctgggaagttctaattaaaaatgaataaaataatctgattcaaaatactagtcctgacccaaactactgactgcagaagacacctgatccctgttttgaagaagctaacattcatttcattgggtatatgtcattaccacaaacaaaagaaagctcattttgtatatattgacaagttagaattttttgttattaacaggtttggcaaacatcgaaaagatgacaagattgagaaaacgggtaaaataaaaatacaggaatcctttacatcagaagaggagaggatacgaatgaagcaggagcaggagaggtagacttcagttacttgattaaacctccttagaaagaggttctttttttttttctttctactttcttcttttttaatgtaaagattttacatttaattactcttcatatttcctgtatcaacccaaatattgatggttgtgggtgaatatattgtaaagagagatttaaaaaaaaaaaccttatatgtatttgtgacatcaaagtggattttaattgctttagttaagatcttttgcataggaaatagaacagcatattagatgaataaataaacattaatactgaatttatgattttttaaaataacacaaaaagtacttaaaatcctgcctgatatatggatatttagtatattataataattttaaagaaatactcttctgaaaataaaactccgaagttttatatcacattttaaatataataagaattcaggaggctgttattcattatgttgtttttctttcaaacctgacacttatttcttgattctccttctattttaccatcttcacattttgtgacattttccacttaagttttccatgtcttccggatagattgttacctattgttgaatcatttccatgttgagaacttaaagaccaatgaaaggaatgaaaagagttactctaagcaggcactcgaaaaccgtttttctaagtgattagaatttttctcattataattccagggggtgagaaagccatctcacacttttgttattagagtttacaggttcacagtgagcttctctctgtcatcacatttcattttctgagcagccacagctaagaggtactatgcctgttttactttgaataatctgggatttcagtgagtttctggtaccttgatgaaggttataatgctaagtactgtccatagctaggactgtagcccagcatctttaagattaagcccagtattcctaccataattctaaagctaggctgcttttactctaatacttaatgaatgaaataactaaaaatagtatcctacaacagttttatttaaaagagattagtgtttgggtattttttcattcatccttctaatacctctgaggtttttcttgaatagaatggttactctgagtctctgtagcttttcagggtagaaaatgtatgtgggaaaaaatatggattttaaatttatgaagcaagacggctggttcctcctcaatttttatttttaaaaaatcatttcaccttgctttgtaggactctttctaatcctcatcaattttgggattcccaaacttattagtaaattcactatttttgggtttgggtgcatagtgttccttagtgtgtgtgccatagcatttagtgactcagaagtataaacttctatcctagaagagtttcttctccctaaaggaggagactataccaggtaaatgtgtgaactcagattcatccacaggcaaatatgtaatttacttagagagtaatctgagcgacagaaacattatacctcccctatatcttgatacctgccacaggggatagatagcttcattaatcctgtactatttttcatcttctaaacatttcttccttgcagtttaaggtgactgctatgtttccatgcagaattctatcaacattttccaaaatacttttatgatgcttagtcaaatatttccagccaaacaatgatttttacataatggtttcacttgtattattaatttgcctaaggcacagttcacttctcagttttgcttttaatttccatctctgtacctctaatgatgcaatacttctgggaactaggttgatcataatgaatttacaatgtacaggaggcctaaaataaaaatctttcagggtcaaggaataagtgaatggtccattaaaaagtcaattaggctcataatttaagaaaattattatactttgactttgtatttcaataacaactttttgcaagtatgttttatttaaacttatggattttgtaatagagcaagtgaatgcaagaaacggactgaactaggaggtggagtaggtttggcacttgtattttaatagggcaagcattcttccatatgtcgttctttctgttctgtctgtggtattggcagtgttctttttgagaatggaaactgcagcttccttgaaaaaattttgactggagtaatcaataaaaataaataaaccactacttatattctccttacaacctttccctcactgctgactagtagtgaaatacctctcgggatattatttaccactgtagctatttgaattccaaaaattattttggctaattccatataaaaatagaaaacccaacattcccccatgagttatgattgtccacaaaccagaactttttttgcctgtgtacatctgggaatcttgaatattgctcaagatataaatattgaaaaactaaaagggctatgaatataattttaaatgttttttcttcaatgttaagatctatttagatggtgacaatatactagattgttctgagccgggtccaagattaagtttgacttcattcttgctaacttccttccctttctgtcacttgctaccaacactgtgaggttgggtcttgagtaaatgccatccatatgggagaaatggactaggaagatcactgtatggatctgtgctctgctctactagccctgccctgcctcagactagagcctccatgagtatggtcttcttgagaagcggggagtctgggcgtgataccaagggggaagttaacaggttttccgacatgctatttttgacttctcattctggagcactgaacctaggtaccctattttttcagagatgctgttggctacattggagacagactgagaaactaagcaaaaatgtgaattcagtgcttcgtgcctctgacttgtgtttcaggcatgcctagggacagcgcctctactggctcatttccaccacatgaaaggtttaggctccaaactcaaaacagaacatgttccaattaagtgatctacgtaacttcaggtctacttagcctcccatacaaagccccgtgatagatttctctgtcgaccaagcatcacacgttggctttctgttgtttttgctccagtgatacctccatgtatttttaaatggtagtatatacactatgtggtacaggattgcccagtgttcagcagcagagaatgtgttctgtttacaagtatgtttgagaaacacttgtttaaaccagtatatgcgtatctttctactctgttatttctcaaaattctaccaagttcatgtgcattatgagtcaccaagataggaacagagagtcaccattctccaaacttatttattctcaaaacatcctctcaacccctcactttttgcttttcctggaatactgacatcccacaacattctgagtcactggggaaataccaagggcaagtaaagaccgttgactcctggttcagcggtgttcagcttactcctctaactggctgtggaaaccggagttgattgttttccagaactgcgagcaagtttaaagcagtgttgtaacctgtctctactttctggcttctgttttgtggacttatgaaagtgcgtgcttaccactgctcctcctttttcagttttctctttcccacctttctcacttgtttaaaaaatgtacctttttaagctctagttctaagtttattctaatactaaaaactacagaaaaatttgggagaaacccataaaattacaatcagaaaacaaaaatttatctgtattaacacactgttaacatactggtctgtgctaatcattttttttcctataaagtacacattttccacacctatgtacttttaagaagttgacatctattttcatttttatttattttgcatttttatgcattcttagaaaatcatattaaatgttttctggatcacggtcaggtctgtgtgaacagacaaatgggaaagagggacagaaagaaggaaagatgttctgaaacatgaaatattagctatgatatctggccaaatttcccaactctcaaataatattctcctcatgttattcattctattaaatgaggtttataatgttagctggcttgtattttgtagttattcagccattgaaagctattacaatattattatctatatctgcatagtaagttgtgcttgggaacatttccagggatactgaatgcttctagtggaaatatgtaaaagttaattaatttcttattaaatcctcccagtatagaaggaatatttataaatctccttaggaaacagatgatctgaaactttccattattcaatgttctaatcatctttcaaagccttgtgttttcaataccagaccgttgaactatctgtgtccttcagtgggatactccccattcttggtgtgtcattttgcaagtttatgtggattttctgcatgccgtttcctctctttctaattttaccagctgttctcagtaatacctgctttgggtaattacttgaactttttgtcatctcagttggtaggatccttttcagcaagtgatacatgtttgttttcctaacactaatctttgcatttagatcacttattgtcatgcaaagattgtcttttaaaaattaaccttttaagagaaacattttttctatcctgtagcagcatttttcatgtttctttgacctcgtgaatcctttagaaaagtcaattctaatcaataggctaagtttcaagtttttttaaaaaaattttcattgcacaggtaaatgagaatttttaagaatctgttaacctgctttgtagaacttaactatttcgataaatacttgattgggtgtgttggctcacacctgtaatcctaacactttgtaatcctaacactttagcaagagcatcacttcagcccaggagttcgaggctgcagtgagctgctgtggttgtgccactgccctccagcttttgtgacagagtgagagcttgtctctaaaaaaaaaaaaaaaaaaaaaaggaaaaaatatagatgaatacttgaggaaaattaagcgttaggcatactatatatctgaaaccgattttattgacagatactgcaaatgaagtaggaaaatgcagtttgctttctgatgagagctgtcctagatatatttggcttaagagcatctctctgcattggcaataattgtaggtgctttaatatccatgaaagcctgaacattacttgagtgagtatctgttgagatgtgtttgtgtctgttggttagggaaatattattctagtgttttattagtcagtataagacaactggttttgttgtttcacaatatattaagtgtatcagacagtatattagtctgttctcatgctgctataaggacatactcgagactgggtaatttataaagtaaagaggtctaattgactcagttccacagggctaaggaggcctcaggaaacttacaatcatggcagaatgggaagcaaacacgtccttcttcacgtggcgggagaaaagagaagaatgagagcccagcaaagggggatgccccttataaaaccatcagattttgtgagatctaagtcactatcacaagaacaggagggggaaaccgcccccatgattcaattatctccacctggttcctcccatgacacgtggggattatgggaactacaattcacaatgagatttgggtgggaacacagccaaaccatatcagatagtataagtctttttaaaattactattttaaaatgttttttccctctcagggatcccttacctttgttaagagaaaaagatttaagcatgttaacattaaaaaattgatgtaaggctgctcagaaggctgaggtggtaggatcacttgaggccaggagttcgataccagcctgggcaacatagcaagactctgtccctaaaaatattttttttaattagcagggcatggtggtatgcacctgtagtcccagacactcaggaggctggtgtgggaggatgtcttgagcccaggagttcaaggctgaagtgagctatgattatactactgcactccagcctgggcaacagagtaagacccctgtctctgggcagggggaaaagacaatataatcaattgttaaaatagatgattacagagctttgggaaggggaacgaccagtggggctggagttagtagtgactgcttcatagagatgatagtttgggagctagatcttattcccaagaatatgtataatttagcaaactagaaaaattctaccctcactttcagtctctctccccctaagcacaaaggcttatggaaagtgggcagtcttttaactgcctggattctttacaagttgtgattgtattagtggttagcagtctccctgttaatgctttcttttatctctttttcaacttttaaccgttttgtattttaaaaccagtttcatctcattttagcattgagggatgcaagttaactttccctcccagctattctaagggaccactatatatttcagcaacttgcattcttccctggaattggaaatgtacctttaaaacagttgttttcactcaagaaaatttttttcagggctcatttagaatatggaagtcctttcttctcaatcaacttttaccctaatatgacaaagatattaaaatcccacttaaaattggaactgttaccagggtaagaaatttagtggaatagtatctctcttttgggaattcagcataggcaccaaactggcagcttacctactgttagggggcagttgttagattcacctggcagggggaggatcacccaaaggaaggatgagttgagctgcagtatttttgaagtctgccatctgctgaagtactctgagggcccaataaagccttccatggtggactaaaactgctttctcaacagacggttctttccagttgttttgtagcttaaatttcatttcgccatgaatttgggttttatttgatcaatttctgtaatactgactttttgagagaagaaatactgttggaaaaagatccacgaactgttgttcccagaatgaggcttctggatggcagtgcagtaagttgggggtaaaatgtttcccaaaagagttgattgcaagatcctgaacattgttttgaagatagtcaacaactatctgatatgtagcaatctgaaatttattaaaaacattttttctgttaaactaatattagtatattctatcttctgcagacataactttttaaattaaaaatcgttaaaagacagtttctatttcttgtagtctttaaaaaaatacaacatgtaaaaagagatgtgttgcagcatcatagctttggaaatggaggtatttggtatgtaactgagaggtttaaggacaccactggttttgcatcccaaggagtttggaaatgaaagtatttagtatgtaactgagaggtttaaggacaccactggttttccatcctaaggagtttggtcacttcggtggttattcccgtacctggtaccttttctggatatataaagactagactttatgatcataaaaagttcctttcatcttattctactgcaattagtgctaaaagccatttattgtaaaagcaaaaatactaatgaatagaaatgttacaaaaacagaagtcttgtgtgttttatcttcatcgagcgtcatccattttaattagagaaaaggtggtgaacactgtgacaagagcctggaattaaaatcattaattgatgtcaagctgaagagagactgttagcatgaatttagtgacagcaggaaagaaattaaccttattactttatttagtatattacattattttgtgtattattttctatgcaggttcaaggcaatttcattatcataatggaacactttatttttttttttacaaaaaggaaagatgtatttatgcttgaacataacaagttgaaatgataagttctttattaagttaaaaatgacttgataaaaggttttaattgtttgaatttgttttttcaagtttcaaggataggaaacagtataaatgttgtccatcaatgtcgggtggtacaactgcctgtgataatctgaacttcagaatagttctttttagaaccaggaaggacttactgaaatgtttaaagcaatagacatttatgtcttttgctgggttttggactaatcagttacttctgtcattgttgaggtttggcccgagataaatgggatagagaatgctgaacaacaatctgactgttcagaaaaatgagtgactcttacatcttggagataatttgtgacctcagggtcacaataaaagagtaaagggggtatgcttttatagccctggccatctggatccattaagggctcaactgcaagatactcaccatcttttcaaagtttccttaagaagtcatgttatttttatgaggacaccaaacatgttttcttcctgagccaaatattttcttactgaaatatgtatctccacagagtggaaatacataacatgcaaatataaccttttggtcgtgttagaaagttcatattctcactttgtaacaagacattcaaatatcaaagaatataataaattcatttgtgtcttttgttaattttgcttgtgaattgccactaaaatttatgaaaatcacagtgcatgcttagtttcaaaagtctactctaaagtgctatttgtacagcaagcctcgttagcattaatttctagaatgaacttgagaatgcacattagttcaggctactgaccagatccgttagccttttgcggcagtagttctacctggtggaccacacgtatgctatagttttattctaaggttttcaccaccagtgtaagctgccacattggaaagcagtgatgcaggttttagaactttggggacaacattattggtgatgacaagataagcaatacaaatacaattccttcattattggagccttgaaaaaagtcagtatttctggaaggtactacagatggggctttaacgtttattaggctcagtgactggtggcgattagtcataatgtacaaatttgggtaaaagaaggcagctgagatctgggctttataaatagtacttcatgctgctgagcacttcttttgagagattgacttgttagaaattgactgctaattaatattattttctgcgtcatttggaacaaaagaatattcaaatccagaacccatcagtaatataatgaaactgatgtgcaagaagtttggggagattatttaggtttatgcctcccttgaaaagagtgtgttcctattctctttctgttagctttctttcttaagagggatgcattttctgatgtaagtaagctggatttttcacttttagtgaattaagctagatgtatcatagagtttagtcattaataaatcagtctgagtccttctctttgatttttggaggttctccaaattcagaaatttcagctttatatttatataattatacttaggtctgttgtgttccttcaaacttcttcagtttgccaaacttcaagacttatgtgaatgcctagttaccctggatattacctatgattaagtgactgatgaatggtgaccaaatatcatagtatagtgggttgtcagataagtgatcataattgagtttcaaattaatatcccattgaatgtaagaaagaactcattttcctctttctgctagtgatttctggtcaaatcaagagtcaaaaagacattatggtgcaaagaataaaattatctcctaactcctgtcaaccttccattatggatagctagtatttagtggtaaccagcttttataatagcatccttaactgtcataattgctcttaaatggataaatggcgtaaaaatttaaaaactgtctagtagaattttagctaaatttgacattagaatttgagttgctgtttctcttgtgggtattctgtctgtggaacctacagtcttagagttactaggatctagaacagtcctgataaaaatttctaacttcctaatattcacttttgagttaagaaagtcattggttgtcacctcaggaaataaggttctcctagagagttttggggaacatgagaagcagttttcgttgccccattggggacactgctggattacatgtggctgtgaccagttctggtaaaagtcctgcttgatgacaaatagccccttctcaaatgtcattgggtcctgttgagaaacactgagctaggtgaatttatgtactttttatagctgggagagaagaaaagtcagacagatttgatcccctgtattcaaaattggaaaccaagagtggggtgatggtgatacactagatacaagaaagaaacaaggaaaatgcaaagtttgcttgtaatgctatgtgacaattttctgtctttaaaaaaacttttaagtttgtaataattttagattcataggaagttatgaatatagtacaaagaggtcctatgtacccttcatccagtttcccccagtggttaagttagataactgtagtacagcatcaaaaccaggaaattcgcattggtatagggtgtgtgtagttctgtgtcatcacctgtgcacattagtgtagccactcctacagtaaagaaacagaactatttcatcacagaggtcttcctctgtagctaacccctagccatcactaacctgttcaccaactccatacttttgtcattttgagaatgctatataagtgaaatcatatatgacctgtgagattgactggggtttttttcacattgcatgatgcccttaagacagattcaagttgctgtatgtatcagtagtttgttcatttgtacagctgagtaatgttctgtgatatggacacaccccagtttttttgttttttttgtttttaactattcacctattgtgagctattttgggtgttcccaatatttaaatattacaaataaggtaatatttggcaatgaacaattgcatacaggtttttgcttggacataagttttcacaactttgggatacgtaccgggaggcacaattactggacagtatgataagtatatgtttaatttttaaagatactaccaggctattttccagggtgacagtaccattttaaatttccaactgcaatatatgagaagcccggtttccctacattcatggctgcatttggtattgtcactgttttttattttaaccagtcaggtgtgtagtaatagctcatcatggtcttatttgcatttccctattaactggtggtggcgaacgtcttttcacatgcttgtcatccatatgtcctcttcagtgaaacatcttttcatgtcttttgccattttctaattggattgttttctcattgttgaggtttcaggggtttgtttgtttttttgtttgtttgattgtttgtttgtttgagtcaggatcttgctctgtcacataggctggagtgcagtggcacagtcatggttcactgcagtcttggcctccagggcccaggcaatcctctcacctcagctgggtggctgggattacagctgtgcaccaccatgcccagctaatttttgcattttttgtagagacagggttttactgtgttgcctaggctggtctagaactcctgggctcaagcagcacgcccccatcagcctcctaaagtgctgggattacaggtatgagccgagaaggctgactgttttaaaaaatatttcctggatataagtcctttgtcagatacgtgccttgcaaatatttttttctagtctgtacttattttttcatcttctaattagagcttttcacagaggaaaagttttttattttgatgatgttcaatgtatatacttttaaagttttatggataatggttttggtattagtcctaaaaacccttctccacgcactagttcctaaagaatcccttacattttttcttaagttttatacttttacatttacatttaaacctgtgacccattttgagttaattttttagtaaggtatgaaatttatttttccttttctttttgcctatggttatctcatggctcctgcaccattggttgaaaaaactattttattacattgaattgtttttgctgcagcattgtgtagttttcaacgtatctatcttacacaggtctacataaacgaaagtttggcttatagatgtgtatctgtgtgttttgtttcgttagggattataaatagcattgcatttttaatttcagtgactacgtgttcattgccagcatatggagaatacaatggatttttatatgttgatcttatatcctctgactttgttgaacttgctttttagttctgggagatttttgtagattctttggaattttctttgtagatcatcatgtcatttgcaagtaagaagcattttatttcttccttttccatctgtgtacttttatttccttttctaggcttattgcattgcctagaacttccaacactatgtggaattacagtggtaggagcacacatccttactttatcatagggaaagcattcagtctttctccattatgcatgagggaacctgtcggtttttggtagatgctcttaactttaggaagtttcactttatttctagttttctgaaggttttctgacatgatgggtgttgaattttatcaaatgcttcttctgcatcaattgatacaatcatgtaacttttcttctttgatctgttaatatgatggattgtagtaattgatttttgaatattgaaccaggcttgaatttttgcagtaaacaccatttggtcacggtgtataatttcttttatatattgctgaatttcatttactaatatttcattaagggttttttgctttcatattcatgaggaatattggcctatatagctttcttttctttcttccttttctttgctgctgtctttatctgattttggtatcttttctgaattcttttgaatatatgtttatgtattgtttttgctagcagaggtctacttcaaacatgaaaagaataactgcaataaaagattatattcagtctaaagtgttgctttatagaagtaagattttactgcatttaagtgtgtacttaaatttgtaagtatataaaggagatattttttccattaaaattttattgagggttttaaaattttttccaggtaactaagattgacttaggacataaattatatcaatatattataagttgaagaggacattgtaccaaatagtttaataaaatcatagtaaactaaacgtaacttcagtaaaggtgagcatttaaggtttgtttcttagttgtaatgtaggcaagttttacttcacaatttgattggatacatgccttctagtccttaatttaaggattctccatttctgtatgcatcccatgaaatgacagagtcgatgtcattaagctgagatcctcttttgtcactaatgaagagttatggtgtggattcgtgtttaagcttcatagtaggttgaatgtttatggtgtattaataatgagtaagataggtatatattacatataaatattttcatatataaagtgtatgtaacgttaaaaaaattatttcttgccttaaacaaattcatgagtaatatccaagtagatgccagaaatgatctgttccttgcgagtttttaaagctagttaataagtgaaagtttaaacttaagatttaaattatggccaggcacggtggctcacacttgtaatcccagcactttgggaggctgaggcaggaggatcactggagctcaggagtctgagaccagtctggccaacatggtgaaaccccatctctactgaaaatacaaaaattagccaggcgtggtggtgcacacgtgtaatccctgctacttggcaggctagggcacaagaatcacttgaacctgggaggcggaggttgcagtgagccaagatctcatgccactgccctccagcctgggggacagagtgagactctgtctcaaaaaaaaaaaaaaaaaagatttaaattatgactgcaatcttgtagacatgaacaaagggcatctcaaattattctttttgagcatccatagcattacttaacaatctagaatgtgtatgacctgtcatttataccactgatcttctatagctgcaagaaatcaaatatattttacaacatattttgatgaatgtttctatatgcagttcctaaaaaaggaaaggtttctcttatttcaactttgttctgatttcataggattcaagccaaaactcgagaatttagggaacgacaagctcgagagcgtgactatgctgaaattcaagattttcatcggacatttggctgtgatgatgagttaatgtatgggggagtttcttcttatgaaggttccatggctctcaacgctagacctcagagcccacgagaagggcatatgatggatgctttgtatgcccaagtcaagaagccgcggaattccaaaccctcacctgtagacaggtaggcgccaggggcaatcgtggtattgcttccaaatcagcttttatacagcttctgacaggggagtagaccattcatcaatcctcaaaccagaattgccttttattaatggcctttaaaaagctgttgtgtctaaaagtattgagtttacacaaattgaaacctaatggaaggatcagcagaggttttgatggcttttctaatgattccaacatatttcattttgttctgaagatggttttatacctgagaaccaacctctactttataactcaaataaaaagcaaacttaaaattatgactcttctacttaagtgatatgtccttttattgctaggagagcctctaggtgtggcaattaaatagatggggaatgacatgatttgttccacttatgatttagatggatcactttttttttaggcagcataactttatattatgaaagaatcggtaaatgagaagaataatatagtataacagattgcttattaacagccacagaccacaggtctaaattatgtatatcagtgtagcacacaggagtgcaatgttaactgtattttttaattgatacatgctattttacatgtttataggatacatgtgagtaatttttacatgcatagaatgtgtaatgatcatgtcaggatatttggggtattcctcagcttcagtatttatttatctgttatttgtgttttatcttattttatttatttattttttattatactttaagttctagggtacatgtgcacaacgtgcaggtttggtacatatgtatacatgtgccatgttggcgtgctgcacccattaactcatcatttacattaggtatatctcctaatgctttccctcacccctccccccatcccatgacaggccccggtgtgtgatgttccccttcctgtgtccaagtgttctcattgttcaattcccacctatgagtgagaacatgtggtgtttggttttctgtccttgcaatagtttgctgagaatgatggtttccagcttcatccatgtccctacaaaggacatgaactcatccttttttatggctgcatagtattccatggtatgtatgtgccacattttcttaatccagtctatcattgatggacatttgggttggttccaagtctttgctattgtgaatagtgccgcaataaacatagtgtgcatgtgtctttatagcagcatgatttatagtcctttgggtatatacccagtaataggatggctgggtcaaatggtatttctagttctagatccttgaggaatcgccacactgacttccacaatggttgaactagtttacagtcccaccaacagtgtaaaagtgttcctatttctccacatcctctccagcacctgttgtttcctgactttttaatgatcaccattctaactggtgtgagatggtatctcattatggttttgatttgcatgtcatttgtgttttaatggctatatatttacttaaaattttaactgaaacaatttttaaacgatcttttcccgctctttcatttgtatgttcaagcaccatgaggagtttagttcacaaataatcatttctttttatatcagacatacgcatgttattgtcataaatgatacactcagctcatcatctctcatagtggtttcttataagtgttgctctatttaggaactgggccttgaacattatgaatagcaggtttcattaaaaccaggggctctcaagctttagtgtgtgtcagaatctcctggagggcttcttaaaacacacattgatggactctccccaaattttgattcagtaggtctgaggttgagcccaataatttgcatttcttacccatgtccaggtttgatgctggtaccattggtcctggggatggcactgttaagaaccctcacaaggctagagatgtacgggaaatacttcatccatagcatccatgtgttattggttgctacgttttgcacccagtttctattttacctacttccagttgtttttaatagaggtttgcagatgcaacaggtaactcttaggcaaacccaggaagaagtatttttaaaaatagcaaatgtgaagccagatcttaaggtgaaatgctatagccagagtatttggtttgttgctttgttttgcttttgttgggttttaggttttccttatggtcttatgaaaatctgtaggtctgtttgatattgactataatgactgaataatgtaaattaacataggaggcatatggtttatttagacccctttgctgtgatcacctagaaggttcacttgcttattatctaaccacagatatgtcaggatccaaagaatacaattattatcagtgacaatgacattttctttaaaagctcttacttggtttctgccatacttgtgaatgctgcttatagaaggtcaaacagcatttgaaggccatgaatgtcccattggaattgttttcctgggagaaaggacaccagaatgctggcgttgtcagttagtaacttttggaggaagtaaaaaaaaaaaaattagttgacatattattgatcgttgataaaagcactcatcattttcagcaccttccacatccactttgaaaacctgaaaaatagtagactaccacgtagcagtttttcacacagctcagaagtcccacatgacatcaaagccaggagtcagatgggttctgtcttcccagctcctgaggcccagaagtggttgctttaaaccccagtttaaatcatagtgccctacaagagtctaaatcttgcatgtaaatgtctgcaaattttcagtagcacttacatgctcagaacagcctctgtttctggactccagcatccccacttggagtctgtaccctgcactgtgctaaccccaaactgaaactcagcctcctaatttctgccaaaatgcactcagagaaacattctggaggagactttagtcatgaggatgagttacaccaagcagtaagtaactcagaatcacatcttagacattgctgtattcaaaagcccctctcatcctaactcaagcacagcctcagcagctgtcagacttacgatacttttatgcatttgtgccccagaagggtgattagactagataatttgtgagatgcttccaactcaggagagacataatttatatttttaagaaaaaggactatggaaactttagttttttgtaattattatttttgcagagaataagatgtccattaaacaaagattgatgttactaatccaaaaagttgggaattatcatacctgtaaagcacttcttcatctgcctttaacaggatgtgaatttggctgtgatgtcatggtatcacctccattgtctgttcttgtcaaagagaaagctacatagaaaagtgtttctcagacttgaggagtataggaattttttttttttatagaaagacaatctcttggtactgcagtattgaactaaattgttttgattataatgttacttaaatatgtgtaaaaataaaataggactaaactccttctgttgacaaccattatacaaccataaagccaaacatctttacaaattaaatacaaaaatggcaaagccattaccttcaaatgaacaacattaacttaatgtggccaataatgtttcttaaatctaaactcttgcacaaatcatgaatatggtggtggctgctccatggcaggttcatttgggtttgtttgccgacccccacagtcttgcccatcccttttctctgttgaatttctgcagttcttttgtatgttcctgttcagcagcctttggcctgcagctcccacaggggcatcatgtgtgcacgaagttcagcccgcttctgttgtcattaaccggagacagtgaaaatagcattccatcgtgccttcatgtgtgtaaacccaaattcagacagtgaaatgacacgcctgtaagaagatctagaatatgcttatactaacgtttttgaaaagtaattattcaagtggaaacatgcaacttggaactccgcagagattatttcctgtatgaagaatagacacaatagagaaactcctgtcaactgactaaattccaccaaaatttgcaattggtgtccagtgacctttactattcaaatttttggatttcatgggaatgcaggcagttgacagtctgatgtgtagcctgcatctgttctgggattttcattgttcagtaaggaagcagtgttctacatttcactgcttaatcattttaattgatcttatagtcagaaatatggatctggtagccccacatggaaacagccagggatgatttattaaatgtggtgaatttggcatcaaaatgggacattttctcaatttccacgtattacttataaaatgctttttataagatagcatcatgccatgtctagaaatagtcccatgtctgtttgattttattataacatgaactgtaggctatagtcacagtgtcactgttactactgtttattagtgtcgtgggtaacattttgatttttcaccttggattgatgctaaagagaagcagatcctatccttgtgtttgatatgaataacaaggcttaaaactcacaaaaatgttggcgtaggccgggcacagtggctcacacctgtaatcccagcactttgggaagccaaggcaagaggattgcttgaagcccagcgtctgagaccagcctaggcaacaaagtgagaccccgtctctacaaaaataaaaataaattagccaggcgtggtgacatgcatctacagtcccagctactcgggaggccagggcaggaggatcacttgaacctaggaatttgaggctgcagtgagctatgattgcaccactgcactccagtctgggcaacagaataagattctgtctcttaaaaaaaaaaaaaaaaaatcccagtttttttctggctagcagagtgcctagctaaaagtttcccaggctcccttgcattaagaggtgaccatgtgacgtagttctgactcctaagtgaggagtgtacctagagtggggacttcctataaagctagtcttttcctgagtgaaatggggctgactcattttgtcctttaccattttccctgattctaaagttgtaggctacatgaaggaagaggatagcagtctggtcctgtgagcagctcttctagttcttatcacctgtgaaaagtgaatttgttacgtgtttaagttacctgcaatcaggtttctatttcatgaagccaaaaaccgttctgaatacagatgcttctcaactttcaatggtgttcggtcctgataagctcattgtaagttgaaaataacatattggaaatgcattgaatacgcctcacctaccaaacatcgtgggttagctagcctaccttaaacatgctcagaacacttacattagcctacagttgggcaaaatcatctgttctaacatgaaacctattttataatgaagtgttggatatcttgtacaatttattgagtactgtactaaaaatgaaaaatagattggttgtgtgggtactcaaagtatggtttctactgaatagttagcacctttgcactatctaaagttaaaaatcttaagttgaatcatagcaagtccgggaccatctgtataatgaattgtgcacagaagagcccaaagggaatcattgtcttttgatcaagattgtgtatattttagagaactatcccctggtcaaataatttccacaatattttgtgaaattaagtaatgagcagtattctccagtgttgctcaattagctcttctgcctttcattttgttatgcatctaattaaagaaatgttaccaatcaaatgtctgccagcagctagtcttcttaattctttaagacactgctatcctctgataactcctatttccaccaacaatcctgctataaagtaagaagcagttgagtgtaacgtacaagagaatgaactatggagccagaatacttgagtttgatcctgggctcttcttttttttctttgaaacagggtctcactctgtcacctaggctggtgtatgatttggactcactgcagcctcaacctcctgggcttaagcaatcctcccacatcagcttcctgagtagctaggactacaggcatatgacatgatgcccaactattttttttttattttttgtacagatggggtctcactatgttgcccaggctggtctcaaactcctgggctcaagtgatccacctgcctcagcctcccatagtgctgggattacaggcgtgagccaccgtgctcttcttcctgggctcttctgccatcagctgtgtaaagtctctgcttcactttcctcatctataatatggggataataatggtacttgcctcattaggtttgggaaggattaactgtgttaatgacatataaagcacttcacactgagcatggtctgtagtaagcactatttgtttgctgttgcaactgttacttaggaaatgggcttttactctcaggaaaacacatatgctttcagcatcgccacataggtgcagaaacaagcaaggaatgaaattgaaatcaataaagacaggtttgattctttatacttaacatagatataggagtgtgggaatgcaattctgctgatgccacttccttcattaaatagcttggtctcctaagtattctccataaattacatcacatcatgaactgtttccctttaaattaggagttactgaattcaggataaggcattccagatggcttctataatataaatatttagaatagagtaaatgctgggtagcatgaaatgtcttatttgagagtgacaggtgggtcatggtataaggacctgacctctcaatcaatttcagcctttggtttggtaatttgaaggttttcattttgtacttgcatgaaattctttgaagttcctcatggtttgctttcataaaattcttactgagtctgagtttgcaatactccatggaaatagggcagcttgaacgtctcaaaccttgtctaaaatgttggcatttctgtttacatcaagttatatcttagagggacaggcaagcctgaatcatgatcttaagaactgtaaaggctaggcacagtggcttacatctataatccccacattttgggaagcagagatgggaggatcacttgaggccaggagttcaagaccatcctagacaacacagcgagatgctgtctcttaaaaacactaaaattatccgggcatggtggtcacacacctatagtcccagctactcaggaggctgaggtgggagggttgcttgagcccaggagtttgaggctgcagtgggccatgatcatagcactgcactccagaatcagtgacagagtgagacctcgtctctaaaaaataaaaacatttaaaaaaaaaaaccgtaataggctttgttctaaaacagtggtttttctaatttaagcatatgtagaaagaccctggagcacttcttacagatcctgacctcccctcatagatattttgattcagtagatgtagttgactacaaacccacatttttaccaagtaccccagttgactctgatgcagccatcctttggaaaatattactcttgggctaataaaaaaacagtttggaactccagtatgagttagtttgttactgttaacagtgaagctgtgaaataatttatcatttctgtcagacacagctttatcctggcatttataatgtccattgttcatctatgatcaaataatcattttgtttaaaaggtcatcttgcaggtgtcatattcctaaactgcattctgtccagtgtgtgtgtgtttgtttgtttgtttgtttctttctttctttctttctttctttctttctttctttctttcttttctttctttcttccttccttcctttcttccttcctttcttcctttcttccttcctttcttcctttcttccttcctttcttcctttctttctttgagacagagtctcactctgttgcccaggctggggtgcagtggtgtgatcgtggctcactgcagcctcagcctcctgggttcaagcaattcttctgcctcagcctcctgagtagctgggattacaggcacgtgccatcatgcttggctaatttttgtatttttagtagaggcaggggttcaccatgttggccaggctggtctcgaactcctggcctcaagtgatccacccactttgacctcccaaagtgctgggattacaggcatgagccaccgtgcccagcccctgttcagtgtttcttgacaccagaaagtttcttttcctataggttacacaattctaatttggaaagtttagtacactttaaattcttaacaaagaaatcataaaatcctggtcaataatgttttttttatttgcttgaagacaccatgcaatttgtatttttatatccagagaccagaatctgtagttaaatattctacagaaagacagctttaatggacatttgctgactgtcactatgcaatcatttgccaccaggagtgcattgtcctcaaatataatgggaataaaatacgaactgtgtcactataaatctaaatagcaagaaaatagtaggctagactccccctgcttgctgaggacaccttaatggaaacataaataccataatcacatgctttttgcatgcattttaccactaaagagaaaaatgtcgattttaaaagaaaagacctttgtgaacttgtttcccctcccgttaaaatcagaatccggttgcgtcaaagggaagcctggcaaacacagaacaaaactaattttcttagatataggcacttattaaacatgtgctcttttagaaatgttgggtcatataacaaagttgtatttgctactgaaaaagtcaaataccactttatttatgtttgcttagtattacttacctctgcttttcttgaaatgtgagaaagtaattctcgaaggtagtcaatctcattgtaatgtgagttctgcaagttggtgcctttgctaattaatgtgctccatccaacctgggcctgatctcagtgtccttggctgtctactaatatctctggccttggctagctccttctccattcatgttagcaactcttccaaactttgttggtcccttcagcacaactcagctccagacctctagcccatccacatctgtgcctgggccacttgcctctccttaatagctgaagatcacctttcctccttccaggccagctctctaaacagtcttccagatcccagccccaccacttcaaggcacctgctccgtcagtgtctcctctgagcccctgtcttcagcctctgcctttctactggaacttccatgtaaacatgttaatgtctaccatactgtttaaaaagaaaaaaattggccaggtgtggcagctcacgcctgtaatcccaacactttgggagggtgagtctggaggattgcttgagcccaggagtttgaggccactttgggcaacatggcgaaaacccatctttacaaaaaatttaaaaattaactgggcatggtggtacccacctgtagtctcagctacttggaaggctgacataggaggattgcttgagcccaggagttcgaaatcagcctgggcaacacagtgagaccccgtctctacaaaaaataaaattacctgggcatagtggcacctacctgtagtcacagctacttgggaggctgaggcaggaggatcattgagtccaggagttcgaagcttcagtgagctatggttgttgtaccaatgttctccagcctaggcaacagaatgagaccctgcgctccaacctgggcgataaatgagattctgtctctcaaaaagaaaaaaagaaaaattccctttttaccatctagctatttgcttccctatttttctacttcacttctaattcagacttcttgaaggattattaatacatttgatgtagattgccatatcttctctcccacatctctggttcattcctctcgttgtatgatgggcatgataatgcttccccaaagatgcccacgccctaatttctggaacttgtgaatgttatctcaccaggtgaaaaggaccttcaaatggggaggttttcctggattatccttttgggcccagtgtaatcacaaggctttatcagtgaaagagggaatcagaaggggcagagtcaggaaggaactgaagctgctgccctattgactgaagtcagaggaagggaccatgagccaagggatgcaggtggcttccagtagctggaaaaaaagcgaggaagcagattctcccctcgagcctccggaaggaacttggctctgccaacaccttgattttcacccagttgaaacccatttcagacttctgacccccagaactataatataataaatgtgtgttgtctcaaggcaatacagttgtggtgatttgttgcagtacccatcgtgtatttgtttcctaattgcttcctagaagcatgattcaatgaaacttgagtgctttgcattctagattactctgtggcattcctgaaactctgttctctttgtttttgtggcactgctttccccttcctttgaaactatcctttttttttagagacagaatcttgctctgtcacccaagctggagtcagtggtgcaattatagctcactgcaacctcaaattcctgggcccaagcgcttctcccacctcagcctctcgagtagctgggactacaggtaggtgccaccatgcccagctaattttattttttgtagagacggagtctcactgtgttttgtagacatagggtcttgctatactgccttgaactcctgggttaagcgatcctcccaccttggcctcccgaagcactgagattgtagatgtgagccactgtgtccttttgaactattctttagatgtctctttagaggttctattctactttttcctcttaggttttggatttcctagggaaatagctctggaccactgctatttcctatgtgtttttcttggttaaggttttcactaccattaggcataatgatgcctgatctcactagcccagttctctctttataagccccagatttctccagcaccaccagctgggaatgcacatttcctgtgcctatcagtcacctgatcccaactgatctaaaacagaattcatcattcttcattctaaacctcctctagtttcaacagcctaatctcagcaaacgcaatcacaacccacacatctcaagccagagcctttcttttgtagcctgctccccccgataacagtcagagacaaagccctaccaatttgccattacaagtaattccacatccttctctccttctgtcgtgcggcccatggatactgatggtcgtctcctgacccctctcccatctccagtcttgttctccacaagtccgtatttcacccagtacctggagttttgtacctgaaacaaaatatgaccatgtcattcccttgcttaaaataattctgtggcttattgtctccaagatgcagtctaagccctcagtatggtgtttacgggcctgtaagacatccaatctcaggctaattatatcagactgtgtcatattggttcacatcatactataggatcagtttaaaaggataaatccaattgcatctaatacatgggtgaattacgtggctctttggtgttatacattttgcaaatgttaaattttggtgagttaaaaacaagcaatcaccatccattaagctattctaatatagttagagatgcagcaatgaaattaaaggctgaggtgacataaaacacccaacaaatgaaatcttgaaagtaatgaagccataaataaggtcatggctaattttaaagacttcttgtttaattctttttgttgattaacattgcccgaaaccacaatttgtttgtagaagtaatgtgtaatgggggttgtttatttatgtatttattttagccttagaggaagtttaaatattctgcagaaatgtggggataaatgaaagctgttttagactttggtcgttagcaggcaaataatcctccagcagagtatctgcatttttgttttaatgtctttcccttcatagaccactgaacttttaggtctttaaagagattttaggccattccatgatcaaaatctcctggagctgcctgggatttctttcaattttagccttctaacaaaagctccaagatcctgcttcatgtgcaatttggcacgataactcatctttttattttgacctaatcacttggttctcctgtcctttagacagtacaaacccatggcttcaagtaccaatcttgttggtattttgtgatcttaagtttgtgttattttcttccttgctcctgcataaggatggaatatcaatcaactattaataaaaattcatgaggatttatgtggagtcccattgtgagatgcattttcaacttcttgggagactttatcgagccctaaatccgcaatccagttttaaattaacttcccagatgttctagagcttttccttgggtaccctaagtccttggtgtaaataactatttgattactttctttctcttgttgtttcatgtcttcttccattttttccccaattggttgattttgtgtaactaaaggagatgcagtagttgattttaaaagatacctgttttcttttccaatcaagcaagttgagatatccttagtatttttcattaaaacaggtgtgtacatagaaatgtgaaaattataaactttctgtatcgttacagaacagaaagtaactagataattcatttgttctatggctatgtaataactattttgaatatgcatttcacattgcataaaatggactccaatgttagagtgaattaatgtagattgttgtatatatacatttctgtaaaactgacagatatttttaaactgaattttctgtatcagtttatgcctttcattactagttctattccatagactatatagggggtcttgggttgactctttgagaatacagggatttgaaaatatttgttcctaaaacaaaatgctttgggaccaggtagttgcctccaaggtgattccttttggtgaggtgggtggatgtctcttgcagcttaactgtttttacagactataaatgtaaattaaatatcacttacaggcaagaaactgatcttagcctgagactgcacttccttatcacctttgttttaactgaaagtcctgattgtctccgagagaggccagcctggccctgctccggctgtggtaaccttgccagggtttggggcctgaccaagtgtggagcaaacgacagagcagaagcccatggagctcagctcatgaccaaagctgcagagtgtccagatgaaatggtgaacaccaagttcatgaggccagaggattccctgatgtgcacaaattcggacaaaagcttcagtacttggaattgattgataatgtccatctaagtagaggaaatgatataaagtctgaattagtgaataattagcgaatatgttgaaagatatgatattccgaactttaaagtgtatccagcaactcagatgaaatgcttacactgcttcagttagtaaatctttattttttaaactctattataggttgtttttaattccaattttgaaatcagatttgcttacattttgttttgatgtgattcatgtgttgattccaacaccattggaataaaaagtagttattctaagttcccctcaaatgaatccccctaaaatcttatttatactacaaatgtatatagaaaaatgtacttaatagtggaaaagtacgtttctttataaattttcaaaagctacaaatagtggcgtgtaaaataattataaatcacctctgtgaaaaatactgctttagtttcatgttgacttcatataattctggaattgtgaaaatatatttaaaaataagagtttgtcgtcttccatgaagaaaagtgttatttaaaaggaaaaaagtttgccatttcagaacttactgatgatcatgacctggaaacagttccctccagataaatctgcatgacaaccacctaacagatatctttttcctcttttctctggcctctgctttgattacttaacaggtcattcattaccaggcagaaagtttgaaaagcagtaattttttagtcttctgaaagttatataatacactgaacctgtatcaggtacttagaaggcagtgcagtggtaaaataaaaatttaactccaagtttgtttttaattctattattacctaggatttttaaagaagggaagggcaggatgcaaatggaattggggtgtgctgaggttgtagaggaccagttgagcaaggtacagacaatacaactccaaggggtgctataaaactatagcgtggattggaacacttccggtgattttttttctggcagttggcagccaagtgtcttgaggaatgagggttttctctgtatttcacaaagtcactgtgtggtctgtggcagaaaggagggagatctaaaaaatgatttaaatcgtaaattattagaatttggttgcaacagaatttgtgggggagggttttgggggttttgcaagctattagcataatttaaaaaatacctgctttgtaacaaaaactaaagctgattgaggttacagacttctagttattcttttccttctatttccttctttcctttggtctgtatgtttcagccctgtgaaatagtcaagggtttaaagtctttgcacaagcccagagttcttgtacacatctgtctgtcagtgtatctggcagcctttgtgactgattactcacttccccacaatttgactgtgggccaagaattgtggtaggtgcctgtggtagggatggaaatgaataagacctattcacccctcagggtcaccccacctggtatcacatagcagaccacactcaatacattgtgtacagagtgataagaattaaataggatgctaaggagactgactcaggttgaggaaggatgggcttctaaggggtgatgtgcttgagctgcatcctgaattcctaaatgggaaagagctaaatttttatacacacacacacacacacacacacacacacacacacacacacgtttacctacctagatgttaatactcacctttcatcactatttttaaatgttgattacacaattacaatgacaaaaagagagatcatagatgttataacaaatgtaactttatcttaatttttttgtttgtttttgtttttgtttttgtttttgtttttgagacagagtcttgctctgtcgcccaggctggagtgcagtggtgcgatctcggctcactgcaagctctgcctcctgggttcacgccattcttctgcctcagcctcctgagtagctgggactacagcacgtgccaccatgcccagctaatttttgtatttttagtagagatagggtttcgccatgttggccaggctggtctcgaacgcctgatcttgtgatccacccgccttggcctcccaaagtgctggaattataggagtgagccaccactcccggccttaaaatttttttagtttgtttgtattcatcaggtacaagtgcagtgttgctacattggtatattatattgtgggaagtcagggccttcagtgcacccatcactggagcaatgtgcgtgctgtacccaccgagtaacttctcatcatccagccccctcccactcccacgcttccaagtctctgctgcccgtcataccacactctgcttctgtgtgtccacattattaaggtcccacttatgagtgacaacatgctgacctagttttgacagacaggggacctagttaaggtactggatttatatcttcctggtaaatattaaatatgatgaacactttactgtgaaagttcctagatacctcttgccctgaaaagccactggcagacagctgtgtcttctctgagtggtcgtctgattctttgaaactttctatgatatttcagcaattaaggattgcttagcctctacactcatggtgtcctgaaacctcaggtagctgaggccttaagacctgcgggataatgagggagagccaggccatgaagagatgctgcagaccctccaaggtagcaaccagatggcttctaggcctcaggtaccgtggctcatcactgtgggtggtgattgtgactgtatggatcagttccagagtaggtctgtcagaatatcaatgtctttaatatagttttaagcatttgaagaatttaacattcttggtttggccattcatgactgtgaatgacacatgatttacagtattgctagggcctgtaggctttgctggagcatgaggggttaaagaactaatgtgagtcaaggacagtatctgttgcgcacctacttgacacaaactactttactaggccatttcagatacacagacaaatgtcgtaaagtaatgattgagtccacaccttccttctgatatttatttgtaaggaattttatttgcatctgggagagttccattagtctctctttgtaacagacaaatctaaaacctactcccacagtttcttgtaaagaccagcacatctttgaattgtcttggttttttaataagatttccagcttttataccagatcaaggcaaactggatgtaaatatagcgttatccttgctgaacactgttgcagaccaacaggttcacagtttcctacatcctacccatttataactgaaacagtatgtcagttgatttttaaaagtgcaggtggttttctgatcgttcactatgatttcctttacagcaagggcatgagagcaccatttccccacttttatatctagtccgttcttgaaaatgtgtaacaaatgactatgcatatatatatatatagacatacatacacacatacacatatatataaagttatatatatacacacacataaacatatatattcacagaagttgtgttctcagaataatagtaaaataaacaatgatgcttcatgcaggcactggtgataaactccactgtgtcgggatgatccagggctgagacacagatcagcaagggccgctgccatttccctttcagatcactgtagagacaggtgtgtgcagacaggaagcacccttttccattaactgtctctcctgacccctctctggactctgccagcgcttgcccatggccatcagggttaagtttgcctgtgtggcttccaaggagagcaacggggaagggagaggaaggacgaggagataacaagttggttggcagcccaggcaaattctgggacgtcacaggagcctcagtccttaggagggagtgagtcagaggtgcttctgcatggaatgtcacactctcaggagcacacacctgtagggacctcagctgcctctgaggggcctggctctgtccccaaagcacagcagctgggggcaggcaggcagcaccaccacgcagtgactggtgttagttgacgtgaccacacgcaggtaatttaaaagtgcagctctcccctccccctccccagcacaccctgactcccttccctgccttctttttcttgctagtccttatggcattatgatgcggcataaatgcactttaaaaatgttatcatccgtctcctccaactagaatgaagttgcattttggagcggggcagggggtgttgtctgttgtctgtttcattcactgctgtattccaagttctaccacacagacattcaaatatgttcaataaattaaggaatggataaaccaaactcctcatcagcacagcaaagacagtttatgggatgtatgtgtgataagactgtaagctgtgtaggagcagagagagcctgtttttagaaaagaaacctggagtttctgtcagcaaaatgcagttaaacattttaagtgttaaagtcccttttgcttattgtatgttaaacttataattcttgtaggtttcttagaacttgtatagttttgagagagagagagagggggaagagcaaaagaggatttgatacaacaccataccataagatgataaggtaagatgtgatgtaggtatttttaagagcacaggctctgaagccagcttaagttcacatcccagctctgccatttaaccttctgtgccttacttcttgtatctgcaaaacggggataataacacttacctcactggggtttttttgtgagcatgacatgaatgactacatgtaaggcactttgaacactgcctggcacacagagcagtcccataaatgttagttgctattgttcgtatgatgccaccactaccatcaccgtcgtctttgttcttgagttctaagggcatttcaaagctaaaaggtttgccacagagattgtttttgcatgggtatgatattggattctgtatcttatttttagcatcttttatgtgtaaacaccacttaagttagatttgtcacctttgtatttcatgatacaactgatgtctgtacctctttaccttacatactgctgctaaaatgggcatggttatggacatttgattaatttctgtaattaggaagcgtcttaatctttagtaatttggtatagtatttcacttgaatagctaaagattaatttccataacaggagactaaggtgaaagaggtttatgatattagaggatgtgattgaagatcgtgcaggcctcaggcctggagtcagattctctcagagcttgtgatgcaacctgggtaattctcactcttaagagagaactgctttcctcctggaagtgtggaggggaatgataaggccgtcttcaatagctgtatgatatatttaaataaaatctgccatagaattgcataatattagtattataaatgccttgtatcattatatgataattaaaataagttctatgttaataaatatgtagtgtactattattgatgtttgctttatggtaaacaggaaacatcttgagtgatttttttttttttatttccagcttggaaatgataaacaaaatctgaaaaggggcttacttttttttcttttattactgagtatgtctgtttctggcacattttttccacttacctgggtcaactacatacatatctcctaaaatgaagtctctgtatacccaagggtagctaaatgcccgtcaaggaataaatgaatgcatttgagttgttttaattagctaggtatgatttaaaggttgctgaaatcaaaaagccttattcatttttcatcaataatcacttaccttaatatttcattagaacctgctgatttgcagactccttctgggctttgattcattatgactgcagacataatttaactttctctctttttctcgttctgtattatgctctttcatctctgagacactattaagatgtttccagcattcagaaggctgctaattgatccaactttttttttctttttttaactgtacttaaagctaagagttctaggctgtggaaagctgtgtgtgtgtggagggggagcagttttctttaattctttaaacagctgataataacgtgtaaattttctatttcatatgttccaagaattaggatggacttattgtatgcagcaggcaggaagtacatagtttggccacattcttaagagtatgccatcaattggaaagaacaaagcatctcgtgtgtggcatgctcaccagatgagattgctatccatgcatataccttattttcaaaatatttctctagttgctttagatgcagcctagcatgtggcctcggatgtgcagcgtgcctggtggactcaggtagtgactgctatcccaggcatctgtgctgccacctagggagtatggctctcatgcggagaagttgagagatgggccctcagattaataggatgcttgtgcagaaaagagccattcttcttcttaaactgtgcctttatatgaatgatcagatcagagccagagacagaccatacagggtgggggacatatggttggaacttcttaaaagccaaaattccaggcacctgtctttaaacacagttatatcttagttttttgggggagagtagctaatctaaaacttaaaaatatacccagcacggactggaattctgactggctgatgctggcaatgagaaaagaaaatagataaatgtgtaaataggtatttttcatttcttccagattatgaaatgctgcatgtctgtcttttataaccatgttaaatggtttgtatgaagtgcatattattaactttcactagctgtgccagttttgatgccgagtaaaaattcctaaatgttaaggaataaatttgtgtccttaaaagcttggtaaatgcaggctgagcatgctggctcatgcctgtaatcccagcactttgggaggctgaggtgggaggattgcttgaagccaggagtttgagaccagcctgggcaacataatgagatgtctactgttaaaaattagaaatgaaaaaatttggtagatgtagatgtatatgtattcagaagtgtaagtatattcattggactagaccttttattaacttattgatactttccaggaaacgtaatgctggtctcccttaccactagatttctgtttcaaacacaagtctaaaaaaaattaaggagccaccaatataaatatctactgatggagaattaaaagaactcttatgtgttaagagattttaaccaccatttaaaattatcaatccccggttaactaaggctgctcttcacattttgcttacctttggaatatttattgatagtgctttctaacactttgtgtgtgtgtgtgttggagttaacatggcttgctttgtgtgagtatgaattttaatactattctttgtttatgatgatcttcaggattctggaagaagttttcagtatagactgtctcttcattgggccttaactttgtgatctcagcctgcctttgcggcttcacagccatttttctacctgtgtgtgcaggtgtgtgctggtgctgggaggtgctattgtagacagagcatgaggcattggattcagatcctggctctgccacttaacttggatgttgggcaagttatctgacctctgtgagcctcattatattcatctgtatttccatttttttgtcctattgttagaccatatgtcagctgtgtcctgatttttatatttagagaatatgttcttgccatgcatcatgatctgtgttagaagctattggggttgaaagagaaaaacagattcaatttctgatagtaatgttcttccagtcttttgggagataacagacggacttaaataacaccaccagttttattgaccatgctgtttattttaatagctaggccagaatggtttgattgacttttgaaaaatctggtatttttttttaccatatggacaaggccatatctggagtgccaagctaataagccttcttttctctgccagtgaaccatgaaagttgttagcaaaatgttttatcttgaattgatccattttccaagctcttggtgatataaacacccatcttaagggataaaatgcagattatctttcatcagtcattggaaatttgttgcattaaagaactgtaggcaactggtatgtgaaatgatctagaaaggaatgtacctagtgtggttggggatgcctaaaaatgtgtaggactcccgtaaatcagttacttatcagtacaaagcacaggtcacattattttgaatgatgttgtaatacttgaacgtaaaaaatgggagtatagtagtacttaattgtaacatttttcttaaacagttaaggtttaaaggaagatgaccgtacttttccgattattaacaaaaggtccaatgtatacaccattctgagtcagaataccaccaatttctgtgtctagcaatgaaacaatgtaaccagtattagttgtctttcaatctaatcagtgaattaagtattcattccatcccaagcctccttgttaccatcaaaatatttgtatctttcatttctctcctctttatgttcctgtttttctttatgttctttagcatgtatttgaagcatctttttaaaaattctttttcctctgattctatcatcactgtcctttctgggtctgtttttgtgttttttgttttgtttgttttgtttctttcagagtcgctgtgtcacgcaggctggagtgcagtggcgtgatcttggctcattgcaacctccgcctcccaggttcaagcaattctcctgcctcagtctcctaaatagctggcattacaggtgtctgccaccatgcccggctaatttttgtatttttagtagagatgaggtttcaccatgttggccaggctggtctcgaactcctgacctcaggtgatccacccaccttggcctcccacagtgctgggattacaggtgtgaaccaccatgtctatcctgtctgtttctattgattgatttttctcctgattgtggccacatttccctcttcctttctatgtctaataattttttatcagatgtcagacattatacattttgtattactgagggcttgggtttcatttttttttttcctttggaaggaggctcttgctctgatacccaagttggagtgtggtggctcactgcagcctcacactcttgggctccagcagtcctcccacctcagcctcctgagtagctgggactacaggcatgcaccaccacacctggcttcattgtattttgtgtgtgttggatctttcctggcaggcagttaagttacatgctaatcttttatatttaaattaccttttaatcgcttttagaccagttgcagagtaactttcattctaaggcctaatttagccccatttccaaggcgtagccctccttgactgaataccctgggtattcagtccatgcagtctcctcctctgcgtgggtactatcagggtgcccacagttgttcatcttacggccgcctggtatttattcttttcacaaaagttgttcttgtctgggcttataggattttcccttactcatgcccagggtgggaatcaaagactgaagagggcccgtgctgatttctggagctctttctctgtgtagttctctcctctcaggtcatctgtctaaagatgctgaccaccttagcctcccagattcataattctgtcccctcaactcagggtggctgcagtgtggtttggttttgctccctgcactgcagtgcccagaaagccaaggtgatggtggggcaccccttctttttttccttttctcaggggttacagtcttagccatcttggtccccagttcctgctgaaaatagttgtttcctatttttgactagttttctagttgcttatagtaggaagttaattctggactactgtatcttcttattgctggaagtggaaatctcttaaaatatatttgaacaactgttctgccaaaggcttctaccatctctttacctcattcttactcttaaaccccttaaaatgggcttcagcccctctctactgaagaaaattcttttcaggtgacaaaattgccaaatctggaggccatcaggaaaatgtgtccacatttgacttataggacacccttcttccttggtcactagtgctctcctgtgtcttcactgctgatccccaccttttggggagttcatttgtccctgttgtgattctcacgtgcctacacccttgtctatgtttctccctgtcacgtcttcagctgtcactggtatgatttccattgacactgtagtagtgccgctctgtggcacacaccaagcctggctctgcacacatgtctctgggcatcctgacagcatcacgaactcaacggggacagatctggtggggtctttattatccagaccgtggctgccactgtgtaccatctctctgctcttttcaccagcaccctgtccatctcctgtgctcttcttgcttctccgtccttagccctcatacctagttccggagtgttattgattctatttctatactttttctcagatcagttcttctccacacattccttgttttgttttgttttgttttgttttgttttgttttgtttcagggatgtattaccccttgtctggcataatgaagtcacagcatttacgtgtccacacctgtctcagcccccttgatccctcttagtcctgtctgttacctttctaaattctagtcagggtggcctcactcaccctctccaaagaacgacggcagaatcaagtccaacttacttggcgtggcattctcattctagggaagcactgctgactcaatccccagtatttatcctcattgaaactagtcacctagggctctttcccatcccatattgcgtcaagcattttcctacccccgttacgtatgccttctcatcagtgtggaacgccctgctgcagccctctcctgattctccaatgccatcttttctgcaaatttagtacttttagttggaatgaatctcttcctatcctcagatctgacagagtttgtatgtctgctaagacttccttgggtgtctaaacaggattgttaaaagctatctgtatccgctccactttttgcagtttgtacttttccctgtgttctcccgacatcttctttggtgatgttgggaagtcattaaggcacttcctgagatctgtttttaggactcacactgctgctagaaaacagtctcatacatagggctgtggggtcactgtgtacaaggcaagctctcctgtaaggaaataagaacttatcttaaggagataaggataaggaccatgccttaattcacccttatcccctccaaattcatgtgtacatttttggagaatttaaaggcagtatgtaagatgaatgaatgaaaaatgatgacttcaagatacttaataactcgattcatttatttaagaagattcctttatatagcatgtgaactcagcatgtaagaatgattcaatttttaaaattagattgtataagatttttagtaacatatcaatgacatgggacagaatatatcactttacaaatctattattacactgtaattttttgctaggacttctttcctcaaaaataaccataattcagaattgataacgttgcatttttttcttggtgaatttcttaagccagtggtcatgatataatatcctcctgatactgctggattcaagaacaggtatcaaaaggaaacaaagtatgtaggttattttgaggcccttcagtatctctgttcgtctgtgttttcttcctgggccgttattcaggcaagactgggcactatgtttaactaggcgcaacattttgctgatttcctttaaatgtttcctgagtaagaaatatattatcccttaatcagcctcttttgagatgtctgtttatagtaaacaaaatcttacttcaattagtttcaaattctaagcgaaactactggtaattcgacattgtctaaagtaacatcctgttactgtactgcaatattgaagttgaggtgcaatagaaacagatattaagcttattaccacatttatcaatttattggtattctttaactgatcagccacataggaaaactaatactgacaaggaatttttcttttctcaaacttaagcactgagaatttgggaagcttaacacctttctcttcttatctgtaaaactagataactgtatacaaataaataattatagtcactatcttgtagggttgttgtgcaggatgaatgatctaacctagctaaaacatttgtcatagtgactgcttgcagtattatacatatatttaattatggcgcaggtcaaatttgatgactatatacatatatatatatatttgagatggagtctcgccctgtcacccaggctggggtgcagtggcacaatcttggcttactgtaacctccgcctcctgggttcaagcaattctcctgctcagtgcgcgccgacacacccagccaatttttgtattttttgtagagacggggcttcaccatgttagccaggctggtctggaactcctgacctcgtgatccatccaccttggcctcccaaagtgctgggattacaggcatgagcaaccgtgcctggccatattatgatttttaaaaaatccttaaagtaagtagatcttcagacttcaatgagtagctcagttacttgaagaagcatttcgttttagcacatcataaaatattggacaacatctcggagtttattttaaatggaatttaatctgtaaaaactgcgggccatctatggagtaaacaaaatgaaataatctctgaatgtgatgtattgggcaatgtacttaatatatgttacatatgcataaggatgatttgcatctatctagtgttttccaggtcctttgttttgaatgtgggcatcaggtgggatgagagcatttcaaatttgaactgtcagtacgtgaaccaccgtaacattaattggcagtagtatttcataatgtgtgtgatctgttatagtggtaaaatagattatttttagattcccaatataaaattgttttctcactaggtaattataattggttctgtgtgtaacacaaattttaaatattgtatgttattagttaacaccagcgcaacacagatactaacaagatagaaatgcaaatggattttctgtttcttaaactgtggctacaaatggagaattggttccataaattatggttattatcattttttgagatgaagtcttggtctgttgcccaggttggagtgcaatagtgtgatctcagctcactacaacctccgcctcccagattcaagtgattctccttcctcagcctcccgagtagctgggattacaggtgtgcgccaccacgcccagctaattttttgtatttttagtagaggcagagtttcaccatgttggtcaggctggtctcgaactcctgacctcaaatgatctgcctgcctccacctttcaaagtgtttaaattatttttagtgtgcatactttttacaaggtctttacagtggtcatttctcatggagaggtagttcatacttttgttcgtgaaatattggttttcattaaactttatgttgaaaagcaaacctttagaatcatatatttctgccattttagagctggaaggagcatggtttaacaacccctcattttacgggagttgaactggtctgggggtgtggtgctggggatgaggggtgcagatgaaggtagtcgcctcctaccatcgtctttccttttacggatgtcctctcacatgtgatatggatttggacacctgcaggctagaggggccactgtccttaaataggagtgctgccttggacaaggtcacctgattatcagtagccttttaataaatttataaacaggcatgatcataccaattaaaaaaggaagacagactgatcaagtaaattatatatatgaaagcatgcataaaaacataaagctgtaccagtgtgttatgttccgctatgattataatgacccctgtatactgacctctcccatgagctccaggagtgaattcaaatgcgaagatgtatatgatagcaactttggaaagtagagtatacttgaccatgccagctggttatcataagtatacctggatttaggtatttctgtttaaatgatacctagttaagggtcttacttggacttaaaatgagaagagattttttttttaaaagagactcaatatgcacaatacagatagttataaccatgttgacttgagagttaaacagatacagctgtttgtgagtaagccagacaaatgtgatttgagtgttgaagtactgatgacgcctatttagaacctggtaagaatgctgtggtctgggacttctgggtccatttcttctggcgttggtgttgagacctcgctccctcctgaattccatgtcctccctattactcccacaggctcaagtggtggtagtaccctggagtgcatctgtggccactgtgcagttcgtttcaggttcttgtgaaacatcttgatggcccttcattgcagctgtgattaagacgtgttgccctgctctgtattgagagctcagtctgtttccttcttcttttgcctactacagtgctgctttccattcctctgttctgtgtttttccttttttctctttttatggacctgtctttgctttttcacttctgtgaacactagacaccctgtgccctcccgctgctgaggcccgccaggaccaccgggtctcccaccaccctcccctccaccggtgctccccagtgttcactgtccagccacgctggcctccttgcactccttgactaggccaaatgtagagtcctaggctgctagtgcccctgcccttgccatttcatctgctgggtgtcctgctctggatcttgaaatgactggcatcttcctgttatccaggctcagctcagagtttcctctttagcatggtctacctgatgtcctgtctaaagcacaagccaagccccaccacagacacgtcctctcaagcgcatggtccctcttgaatgctttttatacatagatccatatctcacattgccctgttcatccctgtgtttttctatttctgattctgccctcttaagtgtaactctaggagagcagagaccccatctgtcctgtaaagctgtgtgtctgcaagccccgaaacagcggctggcagacggtggctgctcagttgacactggtttcatggatgtgtgtgtgcagggtgtgggctcctcacccctgagcgtctctttgtttggtggtgcacgctcaggcagtttctgtctgtgttgtctgctcgaggtccttctctctatagttttgagctctgcttggtgggagggactgtttacctctcctcagaaaatcttgctctggagacaggaagggggaggttggggaaaaggaggctgactcctgggtgtgccaccaagaagacatctccaccaggaagcaaaacaagccctctctttatggtgcttcctgtttcttatttttaaagcaacttcttttcaccaaatccaaaaatcccaccttacctcaaggcagctataattaaaagcctgtctgtcaaagattttgctattcagaatttcacatgccttctgaaaaactaaaactcctgaaaattgttatcattgaatacaaaaatagaatgatccctttgactaaagcttaaaattatctgaatatgaaagtgatacttttttgtataaaacttacaaaacataggaaagggaaaagatcatccagcccccaaaacaataatttttaatattttagagtatatgcttagacacatacagttatttgcacatctgtacttactcagaactgaaaataaaatcatactctacataactctttagtaatgtgccctcttacctaataagtcacgaacatctttccagaccacgctgtattctcttacgagaacattttttaagtggctgcatgatctttcattttatggatttatctcgatcaagttgcttaacctctaagcctcggtttcttggtctgtaaaagggaatcataattgtgccttaaacaacctaaaggaattagacgggggtcatacgctaaatcactgagaatgttcctgtcacataggattgctcagtgattgttagctgctgcttctgtttatccaatttcctactatcttgtaacaacttaaaatgaactatgacagatgtccatgatctatcctatttcctgccaataaaatatttttaaactctaaaaatactcatattttttcattttcagataatattatcaaaagatggtagggtatttctacttaaggcaaacaccaattttttttttttttttgagatggagtgtcactccattgcccaggctagaatgcaatggcgcgttattggctcactgcaaactccacctcctaggttcaagtgattctcttgtcgcagtctcctgagtagctgggatcacaggcacacgtcaccatgcccggctacttttttgtatttttagcagagatgaagttttaccaggttggtcaggctggtctcaaactcctgacctcaagtgatccacccgcctcggcctcccaaagtgctgagattacaggcatgagccaccataccaggcccacaaacaccaatttttaaaaactttggttttagcagaaagatcttaggggaaccaggattccatctgaaagtagacttcagcccacttctctcagtctgtgtctgcctctgccttgacacttcttcccctgagccctctgctcaaggcggaggctccgcttttggtactgatgtccaccaggctgtttcagaaagaagccagtgagcacccttccatcggccaccgtgcctagagctgttctccacattctctttttgcttatcctctcagcactcagtgggctgccagcctcaggatggtgttagattaaagaaatggcctatcagagcttagtaattcaccagttctctttaagaattcacatgaccttaaataaaatgttcgatttaacttaaaacaaatcatgtcaagcatgtaagcaaacaaattccgaaatggtgaactgtttctcttattttagattattttcttaaaatacccatctgtatttgtaatgaaggtctattctccttttaaaatatgtcagtgctcttaaactggtggcatgaggaagaaaaaaaagtttaaaataaaatatgtcagtgttaaatttctattctgaagttatgtatatttaaaaccatgtatattcatggctgtacagtgcagttattaagagctggaaaaaatgctgcttatttttaatcaggttgacacagtggatttattaggattttcctccattttatgagttactcagaatctttcttataggaggtggagtgagttagaagagagacgtattccttcaggttagagtcatcttccaagtgagtgtctattcccgtcaccactgtttctctgagattttaaagtgttcagcactgcatggttttttaaaaagcatttcctgtgattttcaaaatattttcttaggctttttttttaagggcatgtatttctctttcttagtcaaaaccgattgttggctaccagcttctttgtctgggacccctatgtgtgggagatgtttgggactaagggagtttgttagccctactgacatttgtattgtttaagtggaactagctattgaaaaatgctaacacaaaacctcagctattcttttattaatgtattaaaaattctgaccaaattaaaacaaccaggagagccttgttgagcctgaatctgttaggctatgaaatgcaccctgggttttgaggaagaagtgagcacatttatagccttaattactcatttgggatactacagtctgttgccaaagccagttatcatcagctttgattagaaatcaggaaagacagctgctgaaatgcagagtgaaaagaattgtattggattagagtggcgttcttttgaatctgaaagagaaggaaagcatctttgggaaacatctgaatatgcatttattttaataattcaatggctagaggtggagtacagtacattgtaagttggagtggttttcattattaaattaagtgcctttgtttagttcatctagattttcctattggctgctgcttttttctctttttgctccattttgatgcaatgttatattcctatttgtgggttgaaatatgtcagtattcataaactaaattcatggaccacccttcccatcatttggcctgatgaaacaccatttaccagtgtgaagccaagccaggagacgcatataaaatactgcatccaaatgctaagtttaaaaagacaacatgcttaattcccaatcctacgtacatggagaagtactactttgagctttattattttaacaatgtaatgtggggttataatatatatcagaataatgtcctaatcaaatgtccctgagtaaatcaaaatttcagagttatattcacttgtatatgttcatagtttatgtaatcaaaagatgtgtcaggaagatttacttcctgccttttgaaagctgtttgagatattgtatggaaatttacatatgagtatttcccccatccttaattaaacttgttaaacagcagcatttctcctatttctacaaaaaactatcatggttgttaaaaaatatatatacagtgcgtatagaagtacacctaacccttaactaaataaataagaatagttgtgtttatattcatatttgcaggagagtaaacatttatgcaaatacactgaagaaaattatcaaacactttgtctccatgtgctctagcttcaaagttaaagctgagaattttcacccagttatttaactctaggcagtgtagtgcttaaacaaaacaaagataacattctgtacctacacaatggatcaaaacagcttccttcatcctcactttggaccatctgtttaaaagaaactaaaaaccctcaggaagcaagcctctcatctgtggttaagagtttacagacacatgctcattctcacaacccagcaatgtgtatcgagggctgtaataggttttgtattagctgtaaaaggctagttgtcttgacctcagcatctgtccgttacagcttctctgttattcggataaatttaaacactctttttgtagaggatctaattttatggtattttaacgtcaactttgataaatattgggaataatattttccaagagctaaattattcttagtttccccatccttttaagaaccctaattctcactctccccctgcactcccttgatgaaaagagttgcagtcatccagacttattggagaatagacttgattggtgctaagagaattgtgaaggtctttagccccacattatttcttattgaatcccactaaaacttttgaaaatttcacattggtttaagagatttggacatctgttaacgttttccgtcttgagtactagcatgggtctaggtctgttccttcctgtaaactagttgttgcaaggcggtcagggttgcaagacaatttttccataataccaaacaggaaaaacaacagtagcgcaacaaaaggtttctaccttgctaaaaggaaaagaatatttttataattaaagcttttagttatttgtcatatactcattatcggaaaatgttgttatctttagtcctgtattgacacaaatgtgttacgtgttctttattatagttgtggaaaactttagtaaaggtggtattaaagtagtcccggtcaggcagccctggaaactgaaataaatggaataagagtgggaaataaaaaaataagcttcaatatctgtgtttagcccagtaaatggtgtctattactacagatgcagttttcttttatggatatcactggacagacagtaggctgtgtagattgtgaaatttagtcatcatctctccagtaagtgctctctctccccatttccttagatcataagctgtaggttacccatattatagccgtcacataccccaaaactagccttgtacttcaatagatggttggattaggtataatctccaaggtctttttaaactctgattccaacatttggcattcaccagctatagagaagatgacattgtcctagtgacacccttttagttgtgcagagttttctcggtatctctgttaattcaaatacttttaaaagtgtttgaatatacttatatggttggatatttttagagagaaataccatgtttggaaacatttcagctggaaaatgcattgaactggatattgtcagacattttctgagaacaaatcaaaatcgtttagtacaatgtaaaatataaaagacatgcaaaagccagagcaattattgcaaccttccttcttcatacatatgcatacctgactcacattcagaccagtaagaccacaagtggatatcattagtcagaactcggcaagatccaatttcatgccagtcacattcacacacacacatttgtttgtttatgtcagtcattagaactcagtaactaaacgtcagtggtagttaatgtggcgttttataaacacatagatgaattggggaaaaaaagcaaattatccacaaatagccaccaattgcaaataatgccatatccatcacaaaaatatctatgagtaggagagaacacgacaagggcaaacaatttgaatgaggttatacaaaaagtcaatgtggtcgactctggaagcatgcctagaatcttaccaacctatgagctgattctcacccaagtcattgtcatgtttagcagcagaattgggctgactgcaaatctctccgatgcttcagccctgacattagcttttatagttccaggaagatttgttgggaatttcaacctagtaatttaagaagcttttatagttctataacataataattttacctttaaaaaatgaatgaagaaaatatggcaaaacttaataaattcacattaagcaggagaaagacctaactaaattagtaatctgaattgtagaatatttttaaaaaattaatagtaacttaattactgtcagattcatggagttccttggagaaattgctttggcaaatagataaggaaaatttacaaatagcacaaaacttggtaaataaagcaatttctaaagaatccgccatggactagtatttttaagttattttctccataaagtgcatgtatgttatcaatttgccttgcaaaatcatttttataagaaagagagctatttctgtttttaccaattatttgtggtatttgaaagtcattcatttacaaaaacataagaatgatatccatttactcattcattcattcattgagcaaatatatattggaggtcactgtgctgggtacatagtggtgagttcaataaagtccttgccttttctagcatgggggatgggagttaactaaaaaataaaataaatgaataaatattttgtaatacattatgataagagcataatcaaggtgctgaataatttctttgggaagatgacatttggctgagtactgaaggatgcaaagaagtcattcatgcagagaagggaggaaagagccacccaggcagaagggagctatgtggacaaagcaaaaggctgggagatgtttagcatgggccagaaactagaaggtagtcagtgtggctacagtgtgttgagtggtatgggaagaaatcagagaggtatgtggcagatgaacctaccgaggcaaagctaaaatatgaaattttattccggatgtcatagggagccatatagtgttctttagattgtgagcatagtctgattcataattttgaaacatcccaatggctttttatgagggaaactgattacaaagtagttgtatcagccaaagtagttatatcagtagttatatcacaaattgattacaaagtagttatgtatcagtagttatatcagaaattgattacaaagtagttacgtatcagtagttatatcagaaattgattacaaagtagttacatcagccaaagtagttttatcagtagttgtatcagaaattgattacaaagtagttctatatcagtagttatatcagaaattgcactaggtacttcaaacagatgagatttagtataggggcttggttacacaggtgttggaagtagaagaaaaaggcaacacagggtaactggagataataactgcagaaggcagctcccacatcacagtgcagagtgtaaagggccaccttggagctcagagacagacagtaggtgaatatccagcacagtgggcagccttgaggcagggaagcctgtgtgagggagctgctgctgctcctgggacagaatcatggaggcttgcactaggaggtgggatgggatagaaataaatagacgagagagcgattttaaacctagagcctataggacctgatgcttattgggtaggaaataaaaaatgactggcaagattctgacttgaacaactaaatatctggggcactgctttttgagatgcagaaagcaagagaaacaggcttagagcattgtaagtgttgagtttagaacatgctgagtttgagatgtcaagcaaatggttagatatgtgaatatggtggacagagaagacatgtagactggagttatggatgtggaaatcaacatgcagatggtatttaaaaccatggaaatggacgatatcatcgagggagagaatggaagagagagaagggctagttctgagcccttgggaatctcctgtgttgagagatcagtacagaagcgacaaggagcaaaggaaactgagatggggtagcaggaataatagaaatcaagagaatgcagtcctatagaaaccaagacaggaaggaggcagcagtccactgtttctagcggacctaagagatgcttaagatgtaacagaatgatgtccatggatttagctacatgaggatatctggctacacgcctgatggggtagtaggctgaagagtttacgggaggcaagggcactccattctgacacagagagtccaagggaatgtaaaggccaaattgtttcctcagttcagggcctacttggagctaggcaaaaaaaaaaaaaaaaaaaaaattaacatttgaggatgggccgggcacggtggctcaggcctgtaatcccagagctttgggaggctgagactggaggattgctggaggcccaggagtttgagaccagccttggcaacatagcgagatctcgtcactacaaaaaattaaaaaattagccacacgtgatggcatgtgcctgtagtcctagctacttgtggggctgagatgggagaattgcatgagcctagcagttcaaagttacagtgagctatgatcacaccattgcactcccgcttgggcaatacagcaagactttgtctctaaaagaaaaaaggaaaacatttgactatacctgccaggaggcaacaatcctacctacccttcccagttactttctctatattgtaatttggggaccaagttcttgtttgtattgcacaatattcctttatgattttcgtgttgaactttcttccaacatactgttctataaaagaggaacatttcattcacgtgtataaaagtcatcttgtttgaaaaatctcagaagataagttgttgggattttaagtcctgattaaaggtttgcctctcgtgaggtctaaagagaagcccacatggccgtgttttaccaggtttcctaaactgtttaggtgtgtgctgtgacgctgcagagcagagatgttactgtgaccttttcaagctcccctttctgtctgtcatatccaggtccagtcatctttaccaaatagatagggtcataaaattgcaattgactggagtccttggaagaaacattttgtgagttttatcagtcccccaaatatctcatatctggactaatagtataatttagatattgctattgaatacctataagacgtggtatctggtaatattatctcagcagcattaacctctgactctgctctcaaaccaggattgggaaagtgaagtatttgcttaatgattgattaatatttggacctttattcgagttctgtgaagcgcctaacatagcgctgagtgtttcggcctattatctcttggtatgtaagttatctcttagtttgctttgctgctataattaaggagataagaacagaaagcctatttcttggtcaaagtgctatttttataggaggacaaaacatgtattgttttactttactatcaacaggccacactgctgatcactaaggttgtgtttaataagtatgttctcttgggccagaatgtcaaatatatccctaatgagttcagtgacatcactgagcgtgcttatgttccttgccaatagtcggcattgttggagcagatgacattagctgtcatctgagcacagatgcgaaggtcagggcgttaacaagcaagagagcttcaagagagaaaaaaaaaagatgaagatttaaagcaaatctgtccatgtcagagaacaatgagtggctgtttagggggagtggtagagacattcaagagaagacatttgcctcatacaagttttctgcacatctctgccctgtggaaattgcgtcagttagagatggacctgaaagatgatcatctgtaagccacagctgccactttgaatgtcgaggtttggaatatgccatagacagccctgacattctaaaattgattgaaattttgtgaccttcagaggtaactaatatatttccagtagtgtgacttctggaagtaatatagttcaggaaccaaaagttgattctttgtagttaatgaacaagttcttttttttttttttttttttttgcctaagattatattaataacactagtgtatgtcaaaaggaaaaaatatctcatgtatatattttttcctgtaagaatagagtatataaagctattttaataaattttgttgaacatgtatatatatgtggatgtctaaaacaaatatgacaaactgagaaatttttgtggctaggatgaacctccgcttttggatacaactggagtaacctgagtttcagttggggttttcttttttaagatacagggtctcgctctgtcacccaggctggaatgctagtggtgcgattatagctcactgcagccttgaactcctgaactcaagagatcttcccacctcagtcttccaagtagctgggactgtatcctcaccccaatgcccagctatgtttaaattttttgataaagatgaggtctcattgtgttgcccaggctgctctcaaactcctggcctcaagtgatcctcccgccctagcctcccaaagcactgggattatgggcgtgagccaccacaccaatcccagcccctagtttgtttttttaagttgccagttgtacaatttcctctctgctctccaaacttgttattttagaatagagagaaaaagagtttctagctttcctggtggttggtttgcattgagaaggaaaaggccaaaatatgacaagacatcctcagtattcagttgactaaaggaaaaataatttggaggaggtagagccagtccagacctatagtcaggtgactagtgggagtcgctaggtatggaaaactttcagtctatttcttctctagatattggccgtattgagatgtctttgtacattgctttttggcaaatatagacaaaatacttaactttaccagtgtgagtttagaacggaatctgccttcatgcagaggtctggagtagaggtagaaggggatgatggaagaggcacaaagttcttccaggtagtacctgctgctgctgggtggaccaggccctggtgtgtttctccctgctcaggaaatccacatgttgaggctttcctgatttctgtggctgggtaggtttatgttctatggtatgtatttatttattggttacagtctttgatttgtggttgctcaatgtattaaatagaaacagaaggccacattgtttcctcagctcagggcctccccagagctgggcaaggaaaggttattcatatttgacactaatgtatttgccttttctgtcgcacctcattgctgcccaagtgtataaatgtgaactaacgcttcagtatttttaaactgtccaaatgcaaataggaattcgtttgagagccacatgacaaaagctagatgaatagttctcacttaagacttttatgtaagaaaaggtactaaaatgcacaaattggatgaataaaatgaaagacatgtttctttgttgcatcagcacttcactcattctctcctttggttatttgtttgcttgttcattcattgcccagtaacaaaaacaacaaaaattgattaggtgtactgaaaacataagaaatatgaggcagaacagagtttgtgacctggagtttttgagcaggttgaacacacacacacacacacacacacacgcaccctcaactagagaagaattatgatgggacgtatgaacaagagcaaaatgatagtattaaagaggcatatttaggcataacagttgtggaatgtatttaaaaagaagagttggggccagatgtggctcacacctgtaatcctagcgctttgggaggtcagggtaggagaatcactcaatgtcagaagttcagagaccagcctgggtcacatagcaagaccctatcactagaataaaattctacactacaataaaaattctaaaattctaaaattagctgcgcatagtggtacacacctgtagtcccagcttactcaggaggccaaggtgggagaattgcttgagcccaggagttcaaggctgcagtgagctgtgatcatgccactgtactccagcctgggtgacagagcaaggttctgtctctaaataaaataaggaggaggaaaattttttaagctgtatttggaggagaggcatctcatgcagaagcagtcatatagctgatgctgagaagctgggcttggtgatcccattggctaggcgtgtggctgttgtgaggactgagtcaaagggacaggggacccagttgctggaggtttggaggctgaaggaaatgataaggaaacactgttatgatgtcctcatcagccctctactcaggagaaacagagatcagggccatggagtaacttggatataaagaggaaagaagtgtgatctcagacgaggtgtggtgactacaggaataaaaagcaaaaaagagagaagcttcaatataatcccagagttacctgcctcagaaacacacgtgcgtaataaagggacagatgaagagagtttcacatggtggaggggatgtctcagcttgcatttgggagcacagggtctgttttttcatttaagtaattttgttgaacacgattcagctcctgtgctgcttaaaatcccatatcttcctctgccattttcatcctaaccaatactttataccagctttattgaagtataatgttcatatcatataattcacccgtttaaagtgtacaagtctataatttttagtaaattcatagagttgtgcaactgtcaccacaatctagtcttttaacatttctatccacaaaaatcccagcagtgttctcaccccagcttatctgcttctgtggatttgcttcttctagacatttcatataaatggaaccgttaatatgtataattttttgcatgtagattcttttttatttttcttccagcttttatgttttggttcgggggtacacgtggaagtttgttacatgggcaaattgcatgtcatgggggcttggtgtacacattactttggcatccgggtagtgagcatagtagtggttacgtggtttttcagtccttaccctcctccctccagtaagccccggtgtctattgttccctctttgtgtccatgtgtactcaatgtttagctcccacttataattgagaacgtacagtatttgattttctgttcccacattcatttccttaggataatggcagctccatctgtgttgctgtaaaggacaggatctcattcctttttatggctgcctagtattgcatggtgtatatgtgccacattttctttattcagtccaccattggtgggcaactaggctggttccattatctttgctattgtaaatagtgctatgataaacataggcgtgcatgtgtctttatggtagaatgatttatattcctttgggtatataaattttatatatacatatatattcccagtatatatatatatatatatatatatataaaaaataattcccattactgggaatatatatatatattcccagtaatgggattgctgagttgaatggtagctctaagttctttgagaaatctccaaactgctttccaccagtggctgaaataatttacattccttccagcagtttgtaagcattcccttttctccacaacctcaccaacatctgttatttttttattatgtatgtatttatttatttagagacagagtttcgctcttgttgcccaggctggcgtgcaatggcgcaatctcggctcactgcaacctctgcctcccgggttcaagcgcttctcttgcctcagcctcctgagtagctgggattacaggcatgtaccaccatgtccagcttatttttttgtatttttagtagagatggggtttccccatgttgatcaggctggtgtcgaactcctgacctcaggtgatccacctacctcggcctcccaaagtgctgggattacaggcgtgagccacagcgcccagccttgactttttaataatagtcattctgactggtgtggagatcattctggttttgatttatatttctctaatgattagtgatgttgattgagcattttttcatatacttgttggccacatgtatgttttcttttgggaagtgtctgttcatgtcctttgcccatttcttaatggagctgtttgtttttgcatgttgatttaagtttcttatagattccagatattagacctttgtcagatgcatagtttgcaagtattttttcccattctgtaggttgtgtgtttactctgttgatagtttcttttgttgcgcggaagctgtttaattaggtcccatttatcaatttttgtttgtgttccaattgcttttgagtcttcttcgtgaaatctttgccatgcatgtggattctttaacttagcattcatctgttcatttaacttagcattcatgctgttgtatatatcaatagttccttcctttattttgcttcatagtatcccattataagatatactactttttttaattcattcaacagtagatgaatatttgggcttttcagtttggggctatgatgaatcatgctgttatgaacttgtgcatacaagtttttctgtggacacgttttatttcccaggggtgagattgcagagttatttgctaagtttatgtttaactttttaataaattgccacactggttttcaaagtggctgaatcattttacattcccaccagcaatgtttgagagttctaatatagtcacatctccaccagtactacttattgtctgtctagttttttttgagacaaagtttcgctctttcccccaggctggagtgcagtggtgcgatcttggctcacagcaacctctgccccctggattcaagcagttctcttgcctcagcctcccaaatagctgggattaccggcatgtgccaacacacccagctactttttgtattttcagtagagacggggtttcaccatgttggtcaggctggtctcaaactcctgaccttaagtgatccacccgcctcagcctcccaaagcgttgggattacaggcattagccacaacacccagcctattgtgtatcctttttattatagccatcctagtgagtgtgaagtggtattttatgattttaatttgcatttttctaatgatgttgaacatctttttgtttgattaatagcctattttctttcttttttggtaaactattcatatcttttgcctccgtttttataagattgcttatcttcttactgaattgtaagtcatttatagatctgggtactagtctttgtaatagatatatggtttaccagtgtttctcccagtctgggacttgtttatgtattttttatttttttaatgcccaaggttacaacaatgtagcttgtttcttaatttacttactgttgtcttttgaagtataaaagtttttaatttcgatgaatccaatttttcaactttattttccttcatcatgcttttgatgtcatatctaagaactctttccctatcccagaaccatgaggatttttctcttatgttttcttccagaagttttacagttttagctcttatgtacatgcctatggtccattttgagataatttttgtatatgagatgaggtaagaaactcaagttatcttgctcgcatgtgtatgttttaaccgataattaaaacagaccagtctggccgggcatggtgactcacacctgtaatcccagcactttaggaggccaaggtgggttgatcacctgaggtcaggagttcaagaccagcctggccaacatggtgaaaccttgtctcaactagaaatacaaaaattagctgggtgtggtggcgtgtgcctgtagtcctagctacttgggaggctgaggcaagggaatcacttgaacccgggaggtggaggttgcagtgagccgagatcatgccactgcactccagcctgggcaacaagagtgaaactctgtcctaaaaaaaaaaaaagagaaaaaaaactagtccagtctgcctggtgaactttcatttgtcctctggaacccatcttggatatttaagctctctgtggtactttccgtgtcctctcttctccactctgatacagcttcctcctacttatctctgtgtacatttgtctgttgttgaatatgaaatccagtattgtcatgatgtgtatatgtctgtgttccctactggaatatgagcttattcatcttggtgttttcaatggctgaaacatagtaggacctaaaatatttttggttaaatttgattaaatattaacatctctaaaccttgaaaatcttggtctcttttttttctgtctctctttcaaaatttaaaacagtcaagcatttgaaacaacaacaacaatgaaaatagagccagggaaccagcttgttcaggaaaaggaataaatcattctagctgacagtactcagtagactgctttgtagctttttgagatagacatataaaaagggacactgatttgatggaacttgaacaggatgatggataagtgctccaggcctaatgaaatagcatgtctaagaaaacctggaaaccctcagatgacagcagacacgcgaccagttccacctctgctatttactcccagtcattctgcgctttgtttggccgagggtttcatggccccctattgattgcagagatgggcacttgtccctctgcccgccctgtgcacttcctgttatggcacctaagttttcctacttcacaggtgtgacaacaaccagtgctttagagagttatcttaaatttgctgcactggagtttgtttatatctctgcatattcaggtgagaatctagtctcctttctccgcagatatttactgaggatttagagtgtgtaaagctctgtgccctgtgcctgtggaagacacatgcacactcgagtgacacctggtctcttcccctgagggggagtttcagtatgcttaaaacactgatgaaagaagaagaaatattgctctaattcccccatgtacctctgcaaaatcttgtgagatttttgccagtccagctgagaagttatctttccatattgtcaacttaagcaggattcattgagcaatgtattcagatattgatcgtcttaactgtgtcttatgaaaagcttttaggtcaatctcttaaagtttgttgttttgagacaggaatataagggcgttgatgattataggatctggctcaggctgtcagaatgagacgacttctccctcctgaggctgacctgcttaggagtttgaaccatatcaaactgtaaggatcaagtacaccctcaaggtttaagaacaagcttttaaaatatccacctctattgtctcgcctctgatgtagtttaaaacatgtcatttagaaaagtgattaggctgggattagagccatgaagacctgggttagaatccaggggctgccacctgctggctgtgtgtccttgagtgtgtgacatggtctctgagccccagtttcccattcaatacaagcagtgttcacacctgtctcacagagatgttacaaaggttaatgaggaaatatatagaggctgggtggacctaccttgtgcataagaagttattaatagatggctgtcattattactgttttcagctatttctgtgctgacatgaacttgattatgctaagcccatacaatttctctgtagcagtctgtagctcatatggtatctcttgattgttttttatcctttagagttcttgttaagtaaaccacacattatggatatggtcaaatttatctctcaccctgttcgccttcccccacgtaaagagctaagcagtctcctgagatgggtctgtgtcccttggttatttttagaaactctcccaacaataaagaaacacactgattcaatagtatctaatatataacctgttttcaagttcccttaattgggatagtttgttttcgatctgggatcctgttaaatgtatgcattgcttttggccatcatgtctttttcagtttcttctcacctggaacgttcattctcccacccttcccctttttatgtccctcttgttggtggcattttggcggaatctgggccagttgtcttgtgtaacatcctgtcctccaaccctgcctggtggcttcctcctgccctgcgagccccatgaggtgatgggacagtgtggtctacaggccccgtgtgtttcctgctctgcctctgctctccgaccccacacgtccagcttcatctctcagaacctgcttctcttccaactgtgggacttaccgaacacagagggttactatgagttcccaatgagatgactaaagggaaggcctgaacaattccgggcccacggtacacctgcgaaaaggttttcggcagctgaataggcgcaggagtgctgcccagagaggtgagaggagagccgggtgggccaggcgaggatgggagcagagagtgtcctgagtgtggtcaaagctagcaaatgcttaagagagcggttttgtttttggtttcctttcttggacttatcgtgctgtgatttggaatacagaggagcaatgtgactctgtaaactgaggtagcagattcagcagggctgatagagcaggaaagctccctttgaaggtagaaattaagtaaagtgctgatccagttctgagcatctggcaagtgctttctggaccttggggacgctcacagacctggggtaccttcacataggtgagaaccacactctcccttcaccaccagatggatctctctctctctccatttattactatcctggttatgccagaaagcttctgctgttgctgctgtttgtgttttcacatttactgcaagagcagcgaggtacgtacatagaaggttcctagatcttgaaggggtctcccatttggggcctcatgctgtcagtccctagtaggagggaccgctttctgcagggcaaggggaaagtcctaatccttcctgggcaggccttagttgtccttaagccactccagggacaaagactgactcaaataactggctgctggtcggtgctagctgttaatacatactttgtgagggcttgtgcaaaatgaaaatgctgggccccttattcagagcgcaagaaaaaatccctttaaaggtattaaaataaaaggcatgtttctttcttctgtggtctccttcccaacttgtcatgatgtttttaatttgctattgaatgttactctaagaaaaataaaataaacttttaaatcattagcatgaattttacctttcatctttatatagtgcaatgctagaggtttttaataaaatttaccatcttaaccatttttaagggtacagttcagtaacattaagtgtattcacactgttgtgatgaacgtcagttttaaagcaaatgtaagagcctttagctggtatgtagaatcactgaaatgacataactcgtatttcatagcttatacatgcatgtgtattgcattgtcaatagaatggtgaaacacaacacaaaactaactcagcggtttgtatctcatttctttacacatggacattgtccccacacccttgacttttggcttactgatgagtaaggaaggactaaaaggaagggtactacaggttgcctgatctttttctttctatgtcatctttggtgtaagtggttgactaacagagatataacacacttgttaagaaaggaacggatagggctccctggtcattcgtgttttatagaatgccattgccttctttctgcattaagagcaagttctgattgctaagagagtagattttaagtattctcaccacaaaaaaataagtacgtgaggtcatgcatatgctaattgatttagccattccaccacctatacatatatcaaaacatcgtattgtacaccataaatagctacaatttttacttatcaaaaaaaaaaaaaaaaaaggcaagtcctggtttgaatggaaaagagtggcctcctgaggctctcagcacctctgcggaactcccaggcttccctggtccatgggaagcttgcgctcatagggtgtcaagggtggccatacaaatggggctacaaggaaagcggtggacatgcacatcaccggatggcctctcccatgcaccatgcacgtgcgcctttaacccatcagacttcacttatcaaagataaaatagtgagagtggcaagacgggaacagcagagcccctccatgcttgggttctgtgtgcctgtcagggttgcacacccacggaggaggtcctgctcatagcagatgtttcacccagccctgcaggaagggaagatattggggatggcactgcttttgggagccccttaaatcaggccatttgaagtggccagtccgtctcccaaaggtggccctgctcccattcctagccctttcctcacattcaatagctctcccgctgctatcccagatgtaatgcgtgggtaccaagaggtgggattgggtaggctttattagtcagaatccatttaactaattcaaactgtttggggaatcatagaaccatacctttatgaaatatgtagcacattagtccccactgtgaatatgttattgaaccaactatgtgctgagaagtgcacataatcttcccaactaggacctaagcagaaggtgccatcacccccatttcacagcttaggaaatggaggccccaagtaggtaaggcagaattaggcattcctccattgcatttcgggtgcctgtattgtggtttcagagctttgtcaatcaccccctattcagagggctgaaggaaaacttcactctctgccaagagtcaccagccctctttgaaacagctcttgtttgagcacaaaatcgcacaggtaaaatgcactctggggtgtgaggcaccaggtgcgatccaagtagagaaaagtgctcattattttgaaggttacaaatggatttcaaacatgggactgttcttttggttacttccggagatgaaagtgcaattttcacaacatactttttcaaaagctatcagaagcttcatattttttaaaaacgcgggatgtcactccctatcgtctctgtggttcccttgtggttgaatattttaatcaggtgtttctgtgctttaaagattttttcatttgatttacaacttgtaggagtggagttgcagtgagtaattaggaagaatgccataaagaggacaaaaggaaggtgaaacccagcgttaataattcagtttcaataaccttaaaaggtttactgttcacttttaaccttgtatcccaaaaagcaagctactgcagtgaatcataaaaatgtttcttttaatttgcaagtcatttatctaagtaggcttacagggactgatgcgttcgtaaaacaaaaaggtcatgaaatgacagcagctgctccattccatcctggccatttgaggtcgcctagcctttgattggaaagatcttagggtttaaactctgtagagtcttgctttcaaaatttatagattagtacagtgccaaatttagtagcattttagttagtaccaggcaaatcaaaatagactcacactagtggagaggcaagaagagactagaagtgatttttgatggggacaaaatgactaagagatttacaggtgatatttaaatcctaacatcaaaaccagggggcaggctgaggttaggctcggcaaggaacttcgaaacacctgcaaactagaaattttacatctcaggaggcctgctaaattaacagagagatttttcacccagatctcattaccagccctattaaaacaatccctgttgaacattctactacgccattgcatagaaaatcaccaggtgcatgaaggtgtgctttgtttcataattaagaggggggtgcatacccccgctaaagtggaagagctaatggcatcttttgtggggtttcttcctcatctttaattaaaaaatatgtaccataataaatggaaccattttttttcctggagttattttctttctgctaatggagtttgtcagtattttgtttctcagtgtttcaggcattctctgcaacatttcctactgccaggcccctctgccacagttgggatatcagcctcctaagaccgccttctatgattgcccttgaaaaaagagggaggctgagattattgagaactccagaaaatgggttactagattttttcattttgattttgacataaagtgggcaggcccagctgaaaaagtgaactaataattcctatacctttaaaggattttgactttttagcgtgaacatttgaagtgagttcttcttcctgctctaggcctttaaatactatggctacttttggcccatcctgaaatcctgtgatgatttgaactatttattcggttttggttgatggacttggaatgcggatctgatcttaaaataggaatcttgatgggctattattttcaggtgccactgattatagaacagttaggttttcaccctttttcttcctctttctggttttgcatcccccaccccacacgacatccctcctcccccatgccatgtcccatcccccatttcccatgccctcctcatctcctgtcctccatgacctctccaatccatctttccactcatggctgattcttctttttttcttcctcttccaacttcttcattgctgtcacgaccttctttaaaataaatttgaaaacttcaaaaaaaaatttgtttttctcttggagaagtgccccaaatggcaaagtatttcccgcccttcccagttttaccagtgatttgctaagtagtccgtctgttacttgggcacatctcagaattgagtaggtttgtggagggttgggtggggacggagtggttagaagctagtctgctttaaatggggcttagagatactctcttgactcacatcttcagggtgatcatctgtagcttgttttttcatggtggttagttaacagaagttgattatgagatttttctggtcctatttattaatttattcattcagcaaacaatgacagagcaccaagtgtggtcctgtgtgccaactcctccaactcctatactaagaatgaaaagatgtcatgtgccttccatagaattttccagaatagagtctaatgggttgagaagtcctgagattcagagcataatttggaaactacaagcatctgaaggttaaaagaccaacagtcaggtgtgcatggtgttccttccttgtcttgaatctcctttgtgagtgatgagtgatgtttcagggacgtaggggcgtgcaggaggtgcctgtggaagggaggtagtattctggcatcggtcacaaacatgagcccagatgtcatgtcttcagaggacagctcctgccccccaatgtgtccagttcccactgtcactcttcatgacttcattatattttttaaggtatccgtcaatatctgaaactacattacttatttatgtaccttttggtgtctacctccctctttagagtcgcagagggaggaatcctgcctgtcttgttcaacattgtgttcctagtacctagaacaaagcctgacctgcaataggaattcagtaaatatgaactgaataaatatcccacgattcaaaatccaaaagcatctcacccttaggccacagtcatgcatgactgcctctgtacttcatgattacaaagcttctcctcatgcactgctttgtctcagtgcacgccacgagcatggttccatgcccgtctatccctgtagtctgctgtctgctccaaggtgtggcacttgacacaccggccccccatttccttatccatgaagtgggatcgcaccacctgttacacctctgtaacgggcattttaaggatgacagtaataatgaattagcctttccaaaagcttatccttatacatacaagtattgagacttgtacaaagggagtgtttttacaagggtagaaaatgatatgtacccttccttttttgataattcaaggacaagttgcaccaaagctgtgagcagtatcagatatttaacactctatcttccaagtgatgacgtgtacgatctagttctcccttcctggagagagacagagacagcgcaagaacaagcaagtgagagcacccagggacagggaagcagtgaggtggacatcctcccaccgagatgttgatgtctaaggcaggccagagttactggatttcacactgtgtcttccataccaacccacgatttcctatcacccacactatcacactattccaaggaagaagaatgatgctctgatggataagcgtttgaggtttcataaccacagaagtcatttgtctaatatagttaaagagacaaatatttatataaatcaaagcatttctttttctgagaagaatgtcattcaatgaggatggggatggggacagagtttaaagatggcatttgctaaaaatgtggacccaagcagtttcctctaaagtgtaattggctgtagtgttaatctttatgtccatagtcaaggaaatcaccattatagttttcacatgtgagggaagtcagacatgccttgtttacattactgccatttataaaacatttaaagcagctattctgctgaataaacattcaagagcctgaaggataagcatatcacttaaacttcttaagactaaactttccaaaccatttcctgccagagggacccaacagcaaaattgcaaactctgtgccctgagatgagataggctgaattagattaagcagcttactgttgacatgtctattgatctgggttcagtgcagtttcctgtctctgccagcagtcagattgctgtatacaataacacagtgtcctggtttatgtgaaattggggactccaagcatcaattactccaggaaggcagtggcactaggagataaggttaagccgcttgcagtgtttaagacggctaaaatccaagcaacatatttgctgtctaaaatgttgcttacaaatttgacagtgttccatttataaaatttccaaagagatcatccagtgttgttctctgcaggtagtcgtacaaatagcattatgaatgcttattgttaaagtggtatatcccacttgctcaattttgtgcatgtttcctaaatatttgcatacaaatattgagctgggtagcaggacatcaagaatgttgtggcgccatcttagaccatcagctgtgcccaaatgagggaatgcagttgatgtaagaaataagtgtcgaccatctgacttgggtattttcttttctctgggaccaatcaagtagattcagtcagctactctctttgtatttctaatacccatttatttgttttcatagagcaattatttttctaaatactaacaactacatatttaatgcaaaaagtgtatacaatacagaaaagcaaatgcaaaccacaaatgtcaccacccgatgacaattattttgaatttttggatgctaacagtattttaagtattatttttaaatacaccctcctccatccacctgtgccagcgtgtgacacacacacttctttgctaagcactcatttaactgcgaatataattcgctatcttttttgattaaaggaaatatggctttccttagaagattcttacctcttgcagtcctacaaacgttatagaaggatagaagttaagcctatgtttatgtacttctgaagagtgtaactagaagacatttttataatccatggagttggaactcttcaaaattcttgatgggtcagctctgttcatgcaagttgtccttaagtttcatgcttaaaatgtaacttcttatttctgtaaaagatgttcacagagcaaattccacgctttcttgtgaaacatatgtgctatgaattggattaaaggatagagttttgaaagtgacatttcagcttgcctatcatgacattttatgtatttttcaatacatatttatctcagaaatatctcccttactttattacaggtagaaacagagtttcacataaaacttaggaaatccctcaaatacagtactgatggaaaccagacctggaaatttgacaagtctgggcacagtttactaacttaattgtattttccgggctgacctcctgagattggtactgtcctcaataagcctttgcaacattcacaccattcttttccattttataccttccaagaatgaggcaaaatgagtgtatttaaagtgtatttagcgtttattggcaaagtttcaggttttatcttttaatgcaattttaattggttttattgcaggattgatgcaagatgcccggaatgccaataggtgagagggctctaataagcaaaatgggccactgcaattactgttgatctgacaacccttaacaaaactagcatgttacattcctgactgcgtctcacccttaaaagaaaccaggcctgatcattttagattttttttcaaggggcctagactcttcgaagtactgagaattcctctcatagtctttctttactgaaatgtcttgactttgtaaatttttaattatcttcaaaatgtcacttctgatgttatgcttctcctgaaaaagagggtcctctctgtatgatgctttcagatatccgttatacaatgatgaacccgatgtaaacaaccacactttaaaataatatatttttttttattttttgcagagacagagtcttgctacattgcccaggctggtcttaaacttttggcctcaagcagtcctcttgcctgagctcccgaagtggtggaattagaggcatcagccacttcttttcatttatatattggttgtggtgtctgcaaggaagagccaaagggaggctgcttttctctcccatgtgcccagaaacgggcatcaccaccccacgttgcttatgttgctcaaaaccataagggcctttgtggtcagtttagcttgtcattgatgatgtgcaaggaagaattattaaattttttgataagaatcacatgtatagccagactaataatggcaataacattattaggactttctgaaatcgcaacacccactgcctccaatttgtgaaccctgaagagctataaatttaggtactctacttaatcaaaagcatccacacatgagaattaatataaggccagcacgatggctcacacctgtaatcccagtgcttgggagcctgaggcaggagtatcactcgaagctaggagttcaagaccagtcttggcaacatagcaaaaccccgtctctacaaaaaatatatttttttaattagctgggcatggtggtgcacacctgtcattccagctactcaggaggctgaggtgggaggattgcctgagcccagaagttcaaggctacagtgagctatgatcacaccactgcaactgcactctagcctgggcaacagagcaagaccctgtctctaaaaacgaaacaaaaaaaagaattaatataaaaagataccctgcaaaaaatcaaaataagttgaaaaatgtataacagaaaaaagtcaatcgtttgtcattatcacatgaaacattcatgaatcgtggagcagcactgcccacgtcacctcctgtcctctgctgccaggcagtggttttaccttgcctttatccctggtatcatgtagccatcttatctctgctataggattgagagccctttgaaggcctctctcttttatctttacacctcccacataaccaaataggaaaccaaacccttataattgtctgtaaacatttatgtaatcattaactgagtcaagttagaccaataggctttccaggcctgagtggaatgtaagaagtgagaatgaaataaaggttggcttcatctgcgctgtggttaggacatagttcatccccaccaaaactcatattgacgtttgacccccaatgtggtggtgttgggaggtggggcatggtgggcgtgcttgggtcactgaggcagatcctcatgaatagattaatgccctcccataggggtgagttcttgctctggtgggagtggattagttcccagcaaagcagattgttaaaggagtccggcttcctcagtttctctttcttgctttctctcttgccatgtggtctctttgcacacacccacccccctttcactttctgccatgagttgaagcaggctgagacccttgccagatgcagctgcccaatcttgaaccttctagccaccagaattgtgggccaagtaaaactcttttctttgtaaattacatggtcttaggtattctgtgatagtaacacaaaacagagtaagataatgtgataaaacacttgggcaagctttggaaaggcctaagatagtgtggagagcaaagagaagccagtgaatttttagggtgactgaagctgattttaagagtgaaatagatgaagaaagatgaaggggcttcgagaagaatgttctgatgatgcctctgagcctgaggtttggtggcagtgttggtgaagataagttagactctcctggatgtttgcaaggcctctgaactggtttttaatcatgagtttctttttttccagttcatcctcaatgtaagggttttctgaccaggttgaactcctgatttattaatggcttttcaagctgctccacagaactccatccacctctgcggcctttgcccccctcagaaccccccctgccccaactgaccttcccattgttccctactccacgaggggctgtagggcgcaccaggtacagtcctggtcttgtctgccttgtatttttaacattttatggtgacacattgggagttatttccctaagtgagacccttttctgaatatatctgtgccctcatagcctagcagagtattcagacttttgaatgatggaaacaaagctgtgggaaaagagcagaatacaaaataacaataccaatttgagctagcagacattgctgtcaggggtcgggctagaaagatgagaaaaactgaagcctgcttagagaggtgttgacaaccaccagatccagaagaatgacctagataacagggcttcaagttctgacatgattttattagagatgtttcagaaatctctactggagaagttgtgggaacacaggggaataaagtcacggggatgggggaggagtcatgatggtaagtgttgatttccccagcatggatcacctgatagcatcatcagttaaattaggataatagcgatttgagcatacttaagttagtagatgcaagaatgggaggagagggcagaaatacacatggaagcaaaatagagcagaaatatatgggagcaaaaaaaaaaaaaaaaagttgagcactctgagattccaaagaagtaacatcttacgtgatataccaaaaagtggccttttctcttgatggaaagaaggaagtgtagtgtccccaaataccagaaagagccttgggaagatctttgggataaccctgggaaggtggagatactgatatgctcacagacagtgagactcctggggagaggaacaggcatctctactcctttttctttttctttctttttttttctttttttgagatggagtcttgctctgtcacccaggctggagtgcagtggctcgatctcggctcactgcaatctccgcctccagggttcaagcaattctcctgcctcacgctccccagtagctgggattacaggcgcccaccaccatgctcagctaatttttgtatttttagaagacgaggtttcaccatgttggccaggctagtctcgaactcctgatctcaagtgatccgtctgcctcggcctcccaaagttctgggatgacaggcgtgaaacatcactcccggcctccattttctaactagaactttgctcccttcctctgtcgtttctgctttccctttttcttctgccttctctctgcgtatgccccactcagttctgagcatttgtaagtgtatcctcactcccttcccgctggcctaactgtgatctgaaagaggaaacacacactttgtaggaggtgacttggcagaggcaagggcctaccagggcttggggtcacacgggccagaactgggcccaaatccttatgcagcccccttctaatctttacgaccctagacacatctccacatctcttggttggaggtgattgctctgccctcacagaaatgcaagaatgaagggtccagggaagagagcgaatgtttatcggtgcgtttcatgagcctgtcacaggctgaagagctgtgtatctgttctcaattctcacgtcaacccggtgaagtagattctgttaatccgtgttaatgagataacacatgcaaagaccttgacacagttcctcactcctcctaagcccataaacatgtcacctgtcctcccttatgattggtaggtgtcacctgaacaggtgaaaaacagtacgttcctttaatattgggggcacagggtcataggagagtgtgcagccaaccccttaccaccacactgtgttgaaaagtcaagtcaggaagcaattgtctgtattcctaaatgaccattgtgcactgaattctagttttcctagaaattacatggttgaaatcatcccagacaccctatttcctgagaaccaagtccaggctgtggctgtgatgatagtgatgtggtgaacttcctctaggagaccacagagttagagtcactcttgttgaatagtctgagcaccttcccaggtatcaagtttttgatcattaatatctactatgtcaatcaggagagaatgatcaattatttccactttgtaccgccggatgtatctcttctccttgtaagtagaaaggtcataacaccttgagctgttacgtatactccacaggccagcaggctccagtgcagaaggtggtgtctaaaagaaatactccccatcgccactctgcccaccaaatgtctcaaccaacatccacacgcaaagtatgtggggcaattcactagtgaaagagtggttctgatttatgttaacatgtcatggaagaattaaaccacaagcttactgaataaaagaaaactcaaatattcctcatactcttccaattcctcttctctccaccacctgcactacacacacacatacatacatgtacaatacatgtgtgagtgcacacatgacctgtttttgcattgattatgataacagagaagataggtgtttatatgttatatgttgggaagttcttagtcctggcctcgcattgagcacatttcataaagacacagtatcactcacatgttcacattttgttatgaattctaaaacttcctagccttgcaatgtatggctaattttataaatttacagcatataaaatatattagaaattcaatgagtctcatctccactaggtaagatttttggtaactgaggattaactttacatataaatattaaagtggtgacttattttggatttctatccataaatatcttacctgatacagttttatcattataacaactttgtgataaaaataataatgttaatgataactaataatagctaacatttactaaatgctttctctcccaagaatttgcatgcattttctcatttggtttctgtagcatccctgtgaggtaagcacttttttaaaaaaccacattacagtacacagaatatgtagaaacttggagaagtgactcagccaagaccccatagctagtaattggtgggaaccaagatttgaacctatgtctctctgacccgtttctttgctcttggttaggaaaactgaattgaggaatatttttctccatttataaaaggtgttaatttttgactgccccccacaacacactaatatctaacattaattttaatatcatttatctcacagaagacagaatcaactatacttggcttcttgaagcaattctcttcctcgctcaaactccgttactgcccctgatgacatctccacatcagctctgccttgttcatgtcgagaatatttaatagcatgacattaaaagaatccttggggctcctgctcctgataaccaaatcaacctccaactacatattctgctagatttttgatgagaaatttcctgtgaaatgaagtttgtttctcattcaaacaaccagtgcatttttcagtgaaagtgctgttcatctcttgacccaagaaatagaattaaaggaagaagggattctaggtcacccaagtagaaagaaaatctgaagtcatctttttccctctagttaaagtttactttgtcttacattttttattcctagtcagaatattatatgtggaattttagtttgcatgaaaatggtcattctcaaatactcttttcaccataatgtatctattagacaagtatatttctgaaagcttaaagaacttgaggtatttaaattcttggagtaattctaacatgtctgtttatttatagaggtttcaaacatttaatagtcattgaagaactgtgggctccctttttaattttttcaatgacatcaaaaccctcgattgttaaatgtctgaaaggaactcagaatgcttgccccacaccatgctgatagctacctggctgcctaggaatctgatggccctcggctccttgaggttcacaaagactgatagctgggtggtacagctcctgtttcctgaacgctcaccctgcatgagcagttctaggggaccgttgggtcacgcttaacacatttctgtagccatctttgcctacctctcttctctgcgtccttaaccctctgcaaaatgatttcacaagaaatcaactatagatgcctgtgccatgaggtgtgatctattagtaaacagccttgttaaaaacgtactgaaaggctggcattcccctggtggtcctggcaaggattcataagattgaagagacatgttagcaacattagatgagaagtcactaatagtgctgttctcttatagaacaattggataactagttatgcaaagcctctataatttggttctgctgcccccattcaggccacctgcagacagtcttcacttaggcaccatccttattgccaattacttttcttcgctgaaatacttcttctttaatgaatgttattatttacactttgcagagtagttcatgacaacctgatttgacttgtgtccacgacagagacttttattttttagaagacatgtaagaaaaaaagtaaatcatgtgttcatggttatgtctctaaaaaatgcaattctgctgatgtgtagctaaagcagcctattaattagcaaaggcacttaaaattgttttacaccacagacagtattcaagctttgagaaataaaaaggtgtgttctttgcatgagaagttcaggcatatattatccagagagagctcattacttttttctcttttacagaaagttagataacagcctcttttgacagaaaaatgtctattttctgacaaaggaccggaggcattcttcttaaaatcagtcattctgggttttctaacaaagcctcgatgttgttcattctaaagaaaattgtgtcaccttaaaaactagattcatgctgggttttcctatttaacatagggattaagagatttaaaacgaaactcttggtaaatatcagttggaatgtccataaagtttactgtgtctcttcattagtgggcggttttggggatttgtaaaaagggtgaaaatatcatcttggtaaaagaaaaggtagagtacacatttaacccttaaatgattctgtgccttatttgtgtaacttgctttgtcctgaagtgagtgaaacttgatccatggtgtcccagcctgcagtgacctctgacactccatctgaggaccagggacagttgttctactcccaccattggaaatgcttttgccagaaccccacggctggggtttcactttttctgtgtcctgactcgtttgcattcaattactttaatgctgagagatgtaggaaatcagctccatctctcagcagttagggtgagggttgcttattgaaaacacttgctgctgtgcttatttttaaaatatatttggttacctttttgtccccacccaagagtgacaaaacaaccaaccatttgaatgggagctaatcagaatactgaattttaactcatcatgagcccctgtgtgagataaaggaggaagtatttgaggcgtgaattgctgatgtaggcttgataagtcttgttttcctagttaaattgtaagcagagaggcctcacccatcccaaccaaacacacaggtgagcatacctgtgtgccagcacacaccatggcagatggtggcttaaagctgggcacacagtgacagctaggtgcttgtcagttgatgaagctgtgtaatctagagtccaggattgatcctgtgaaattataggtgatactgcttttctctggctgtatgggacaagacctcgatctagtagtgaggtaggaggtgagactttactccagaccagactgaagactggttgaaacagaagaggtgagagcacctctccataagacacacctaccagtgccatgttggtttaccattgctatggcaacacctggaagtttccactgctttccatggcagcaacctggaagttaccaccctttttctagaaatttgtaaataacccatctcttaatttgcatgtagttaaaagtggatataaacatgactgcagaactgctccgagctgcttctctccacccactgcccagggagtagctctgctctgcaggagcagtcagggagatgcaacactgcgtcctcaataaagctgtttccttctatcaccgactggctctggagttctttcctgagtgaagccaagaaccttcccgggctaagccccagttttggggcttgcctgtcctgcatcaataggagctgacaaatcttagtagcccaaggaaggccataaaaggggctcactccaggcaaacgccgcccatttcctatttcctacctgtgctggatttgctgaaaccgtcaccatagtgaatgacatctgagacctgtagtctggtttcataccccaatatgctgaagatgtgcaatgaatagctaggggcgctagagccctggaccagcaagcagcctgtgccactgactgccactgttcttgttcctcctggcccagcagccaccttccacacctgcactgggacctcccactgtgcctctcctcccttccatggacttaagtgaagaggtggtcaaattatgcttgactgctgtgatttatacatgtgaaagggttttttaaatgatccatgtggatctgcttttctctggctgtatgggacaagacctcgatctagtagtgaggcaggaggcaagaccccacacagccacaggtgctgcccctcctcccaacatcagcatcggtcctcagccatgaagtgctgtagtttagtggcagcagccatcagatgcgcagccccaggggatggggggactgtatccggagcatacgctgtggtggtctgcctgccgccaactacaatggccacagcaggaacaagtcaaaatcctaagatatgtggctttttcttgaccccagaggaagctaggaaagtgaagaggcaggaggaagtgcaggaggtgagtccctgcccatcttcaggcccagcctctgctgccgccatccccttcctctccagctcccaggctttcaccacacacatcgcttcaccctctccctggccgcccacttcctcttcttagagcctggcattcttctttcaaaattcaagtccctctgcttgccattgcatctgacaccttaccgcactcatacaggattaaggtttgtggatttgacttctgaaaactgataaagtgaacagaggagtgtttttcttaaaataattttttaaaaacactgcagatagatttgaatgctttattaatttgttttctaacgcatgaaaacatttttcatttcacccggcctatctagcatgctaagagaatttaggccagataggaatatttatcaattgagttcagatgtcagcataacaggctaaatacagtcagattaggcaagttcaacaaacaggtgttaaagatctcatttcctgctgattctcacctgaaagtcccagtgacctcagcatcagatgtctcttagttgagaaatacaaaatcaaagattttttttccagcaggtgtataacacacctaactgatttcactagagccctgaggctgatgttggtgaaatgtgcttatgatgcaaaggtttacagtgtgttgttttccaacttttttgatgataatcatccccagactcaaattactccctatagttgctataatgatgcaggcacaatcgtttggcttaattacggttgactgtctaaaactaccttcccctggagtcattgaaagttttattggagttctttaatatgattataaaaattaatggacttgtaattaggtataagagaagcacatccaaagtttgccaaataaacaagtgttctacttatgaagtcacacatttctgcttatgagcccataatatagataccacgaattcaaaatcttatgctggcttgtgtttacatcaagaaagatgatttgaaaatgaattcagatcctcttattgtaggggggaatgtaacgtaagcacacccttaggatgatcctgtatggcagatgcatctgaatatgtgttccaagttagggcatccaggagtagccaacccagagattcattccttgtctgtgaagaacatctgagcccccatcctgttctgttgaacacaagctgtatggaggattggggccctgagttttgggttaaatgaaggttgcaaggtggaggtcgttaaggggagggtgttaagtgaaaacgctgtatataaactgcatgctgtttgcaagtggttgtggttttcctacccagcctgccaacactgcgccgtgaggttatgctttccagcctgccaccactggaccatatgtaaggtggttatcttgtccagcccactgccactggactctctttcctttatgtaagccactaataaaaccccatgtgtcattcgcttgctctgggtctctcctttggcctcttgaacttggtgcctttcctattgaggttaatagaggttccacacggtacttgcaactttctttgaaaagggaatacgttatcattaacatcaatactgtcaacactatcagtaaatgttgatgtacttacctttctacataccttccatttgctaagtgagatctaggcttagtcaacacatttactattcagaaacctctaatcaagtgatagaactctgacttatgaaaattataactacaatctagctgccactgagttttaatcataacatgagaggcgtctttgaggcatttagaaccttctttgaaagacattagatatctcccaaacttcccttgcacatgaacaaaatgtcttcacattatcccttattttattacttgagtgtgtcttctgctgttgcaaaaccaggcattgacagatcaatagaactcaggtgtgtggattcctggtggtacttgtctctgaatatacagtcggccctctgcattcatgggttctgcatcgatggatttgaccaaccacagatcataaatacccggggaaaaaatgaatgaatgattgcatctccactgaacatgttcagatattcttttccttgttattccctaaacagcacagtataacaactatttacatagcatttgcattgtattaggtatcataggcaatctagagatgatttaaagtatacaggaggatgtgggtaggttatatgcaaatattacaccagtttatataatagacttgcacatccgtggattttggtatccacaaggtgtcctggaaccgattccccgtagataccaagagacaactgtatttggaaagcttcagaagctttgcagatgaatgcagaaggctgggagtcagtgggagctttcctaacctcagaacagccattcatttgatctgtgtctagaatgagagtttctctgtgtgagctatgggtgattaatccattttgccttcattcttcagtggtttggcatatagattgaagtgttttgcttttctatttattggcggaggcaaatagaaacagagctctctctctctctcttgcagtgtacccacactccaaagtgccataaaacgaccttcaaaactaaaccatcatattttcttggcacaggcagagcgagaaactggggatggggctgcagctggcagtggggccagggtgctggagtgggggtgttagcaaaaggtaactgtgcccatttggttgtgttcaagtgcagacctcagtgaattgaagttctagcctctcaggatgccagacattgtggctgcttctcaatcacagccagctcagtacagccattgtcactgagagggtttactgttgtatttttttctgaatctgagccatttgtgtgtcacagtaagggaaatagattcatgtattgtgcctcaagtattgccaggaaagcaacatattaagcacatacttagacccttctttttccttctgttattaaattggagataaactcatataaagagtagattctagaatgtaatttggctatattgatgcatataagaaatgccaccctttgcaaaatcaacagggagtaaaaggaagagaatgttttattgagttctcagatatgttgagcaaagttttagtctcttgcctggttcttgatcatctgtgtgatgtggtgaagtcacttagctttctgtacctctgttaacatgcctgtgtcgtttatgcagtgtgacatttggactagaaatgatgctttcctcttccaaagagtggctctcaatctcagtgggctctttcacacctcttatctgtaaaaagttgaaagtatacgtaatgaatatgttcagaagtctttaaaatattttcaccaaatgcagtgcctcatgcctataatcccagcactttgggaggccaaggctggaggattgcttgaagccaagagttcaagaccagcctgggcaacatagtgagatcccatctttataaaagatttaaaaattagccgggtattatggtatgtgcctgtaattccactacacaggaggctgaggcaggagtattgcttggtcccaggaggtcgaggctgcagtgagctgtgatcacaccactgcactcttgcctgagcaacaaagagagaccctgtctctaaaaaaaacaaaaataggctggttcgatggtagtgggttatcagaacttattaatgttagtgtcacaaaagttggtgttaaccccccactgctaaaatctgactggctaaaaatagtaaaaatgaaaacaaaaaatgatactttgcaagccccctgatccttttttccaagagcaatggtgcactggggtggggatcctgtcattcagtgtttcctccctggtatccagcacaaggtcagcagaagtgagtgctcagtgaatgtttgcgaaacagaacgacgtttcttccctttagtttttacgataatggaagctctgtatcctgatggtgtggttggtacatgaatctcttgatgtgttaaaattcattttattttttaacataccctagagttgcttttttgggtgaacaactccttgaattttaacacacagaacttcataccacaaaaaaagtccattttactgtatgttaatttaaagataaaattttaaaacatggctccccttttgaaagagtcactttcagcactctgaagagatgaaccaacaactgaaacttctctctccaaagcattctatgcccttagtatagatggcttttcatttccttctaattatagttctctttgatttcttcataatttatttaaataaactttttacgctgagataaggatctgcgtttgttataaaatactgcttttaaataatgagagaatactgttcccttccaataagtttttcagtggaaataaaatgatttcttagcctttcttgaagcagcaacgaacagaagtattagtgaacagcattcattgagtgcggtatgccacactgctagctcagtaacctgccttggttccctttatcctcagagctcccccaaggtacatgactgcatctttcttcgacagatgagaacttaaagactcagagtggcccatagtacatggtgatagagatgggattggaacccagttctgtctgtctctagatcccatgcctttcgtattccaagaggcctccctgtaaacagatacagtttataaagataatttggcaggtgcgtgtgtctgcatgtatacacaggcactcacacatacattggagagaggaaaggcaggcagtggggggcagggggttgccaaggagctgccagagagtttgttcagtgtcttccctgtttctgaaatagcagaagctgatgcaggaacagctacattcattgagatgcctgtgtcgaccactgcagccagctgaaaaaccatctgctcttatagccctggcgtctgcatgtgagcttttgttccataatgcagcaatatccctagagtggagagagccagtagcctagtaactaatgctttgtcccctccttttcctgttgtcacgactctgtgtctgcagctagtcctctattttttactgtccatctagtgagtggctggaccatcactgatgtgctgttgatgccttatcagggttcagtaagtactaagccatgtgatggatgggcagagggctggcaacagtttcctctttctgctacagactaagactccttaactagagatgaggcaaggaaacagatagaccccatctgctgccacagattcatttcctgacttgcatttcttgcctctcctgcgggtttgttaactcttcagtctttggcaaaagttccattgggcagcaaccacaaatatcagccatcccccaataagtttactgtctgcaggaaaacgaagattttttttttcctgttattgcttaagaggtgttggaagtcagcagtctcgggtcttgctctaactgcctctaattagctaggtgacattataccagttacttaaagtctataagctatattcttccatgaaagaagaattataaaactccctatcttacaaggttgttttcaagatgaactgagataatgaattgaagccacttaacataactagagatcaattgtgattatgattgttatttgtaaccaagatctacatgatcatagctcacaaagatagttcatttataaaaatccactttctttgaccatgatcttcacttaccaatcatgtttcatggctgtcaagatgatttcctctactttaccaaactcaggataataacacaatatcctggaatcactaaaccgtttttcatggatgtggtattctgtttttttggggtcgggcagttgtaacacattcgaatagtctttgttgctaaagaacctaggagaagccaggtagaaattgctctaacgagggacttgcctcattttatggcccagttactgatttctccggttctcattaatcacttgctcagaagggaaagcttgcatcctttattcttgaaagtaggaaggaggtgctcttgctccacaactagtaggaagtaaatgtttgatactcctatttttttaaattctattcatgcttttattcaggtttttcagatttgcttaacacagcaggccaggctttgctgaaggtaaccggggttgggggtgccgcccatggctgtagggcaaaacaaagctccctggtcaccctcatgaaaccatggccatgacctcgttaactctgagctctgccttcactgaccagccactggggattgtcagcttagggcaattaccccttagtcctcacaccagctccacgtgtgagatgcctgtggcttctccaggctaagccctgtcaccgaaccaaactgggtccatttgcctgttcacaacagaaagccaaacaccaaagcactaggtttttatagcaagcaaggttaattgtgaattgactgacaaggagacaggaagatatgctcaaatctatctcccaaagctggggcctgggttgcattttatgagcataggataatgaggtccgatctgattggattttgagatgaggtgatgctgggaggcacgatctgattggatcctgtcatggggtgatgccagagctccatcttattggatcctggatcctgccatgtaatgtccacttcttaattcagtcccattccttggtcccagtgcttaggttctgcccatggttgcatgcttggatcatctagggatgcccaggttttgtgacctttaacctgagagtccatggcaactgaaaagcaactcacagcttggttgcataaaagttgaaccagattggtctgacgttgttacagctgttccacaatggagcagggctcctgagcattaatgatcacccatcgtgacacagtcccaaatacatgggaggcctggggttaaatctgactgtttgactttccctctgtatttgcctgttttctgacacctttctaaggggttgactgtttggggcaatttttgtaatctgtaaaggacatcagggtgcacttcagttgactgttgtaaaacaaaatgacaggtagtgaaaattttctatcaaaatagaataattttaacttttaaaataaggtggcagcattcattataaatattctaaaatgcagaaaagtataaagaaaaaataataatgaccccactacccactgacatcttctaggatcatccttccagttatctcttcacagacacacacacacatacacacacacacacacacacacacacacacacaccaattagtgatttcagataggcattcttatggatttttaattaactttagttaaaattggtacccaggttggaacttagtgaaatatgataaatctgtcttttgctgagtcactaagtgaatgttgactgtttacagaaaaaaagacaaaaatgtgaaactcataatcaccagcattatgtgtgatttttatcttctttttaaaatagctgcattatcctgaatttaatatggttccttaagatcaaaaaatgaagtgattttaaaattggctagaaagtatctatttgcttggcttattgaattttttacaactttaatttctgaatcttgctgttatcattgttaatgttagaagctgcaatgtgaatagcaaggtccgaaaaccatttttcacttttagcttcttattaaataacagcagattcggccgggcgcggtggctcatgcctgcattttgggaggctgaggcaggcggatcacgatgtcaagagatcaagacctcaagaccatcctggccaacatggtgaaaccctgtctctactaaaaatacaaaaattagctgggcgtggtggcgtgcgcctgtagtccccgctgctcgggaggctggggcaggagaatcacttgaacctgggaggcagaggttgcagtgagctgcgatcgcaccacttcactccagcctggcgacagagtgagactgtgtctcaaaataaataaataaataacagctcacctcctgcagtaggagcaaaggttacccagcaaaatatagtggagaattcaaacgaagaactagttaccttgtgttaaaaatactttaaggtaacctggaggcctgaatttattagctcacgcagcatacacctagtctaagtaagagagaagggatggaataatttttatgtcccaaagtcattaaatgcaaattaatgatgtctacattgttgaagttttgacaaaggaacacatgctggaagcttggaggttgattgctgaggaggtttgtttggtgggaatgggcgggtggcctgtgtttcttctgagaggagaacgtgtagtcctaagtgttcattctgaactaggagttcgtggacaaaaaccagtcgggggaaggtttcattccaggcctggtccaatcagttccctcagattgagtagttaacacatgaagagcatctgtgaatactcagaagccaactcaatcttgagaagcaagcaagcatttttcctaaaaatagctggtatttggtcactgtgatagatcgtttaagattatgagctaagtgtgtgtacatacacacactttaaatcgggaggagaacacagtttttgaagaccctgcattcttcatattaatttaacttggttttgagctgaacattgctcgtgtagtgggtgcagatgggaaggcacaggatggcaaagcataatgcctccctggcctccagataccaccagccatttcgtgaggtggatggacagacaaagcttgcggttcatagtaacgccagtatcaaaagaattagcatgggaggcacctcgtgggctgtcacccagacacaggccttagggctggtctccttcttacctacattagcaatcagaacagaaaagggcactctgggaggccaaggtgggcggatcatgaggtcaggagatagagaccatcctggctaacacggtgtaaccctgtctctactaaaaatacagaaaattagccaagtgtggtggcgggcacctgtagtcccagctactcgggaggctgaggcaggagaatggcatgaacccaggaggcagagcttgcagtgagccaagatcgagccactgcactccagcctgggcgacagagcgagactccgtctcaaaaaaaaaaaaaaaaaaaaaaagaaaagggtacaaagtatttgtaactcaaaagacaatacaggcaaaactaagtaacaagaaatactactgtcatgaaaatcatttctctcaagcattgttcaatttaagatgggagctaggaccatcctgtctggtatcaaaaattgtcatcaacataagaaccagtgcaatataaggagattccaagatattaagaataaaggtgatttttttaagtgactctcaaatgagagtgctctttaactggagttgatggggtattaacaagcggagcttaaagcactctattcaaaggtattatgtattatgtcacaaagtggagatgtggtcattgtacgccacgtaaccctgcagagcacaggaatacagaactctgtctgggtcacttatttctagaaagctatagacaaaggagctcacaggccagcaacagaattgattaaagggataggaagagtcatgatgagagcaaattaagtggcagaagtatgaataattgggctaagaaagggtgaagtaagtttaaagtaaaccaattctattatagctaatatttcttgaatgcatattctgtgccccaggcactgcataagccctttacgtgggtttagttttcacagcatttcactttcacagcaactctgtgagttaccactgttatccacgtgtaccgtaccaggaaactaaggtttgaggtaatggttaaggagcttggcctcattttcatagctagcgagtggcaagattttcaggtttgcagtgatacactctgtcctgtgctatttgatgtcatcacatacctcttcctaaaatttggattgggatgtttgtgcccatccacatgactctaaatacatgttttcagtgttgcctctatgtcaccttctgtcccttctcattcttctcggaacatgtgatgccttatattcttagttatgtaaacatcttgtctcttaaactggagctgatttcttgaggatggagaatgtgtttcctgtccaatacataagcactccagaagtgtttgcctttgatgtgtttcttttgattatgtctgtttaaaggatttttctctgataagcacctagcatgttactgtgtgttgtcagttactactcgttttagtacgtgtgtgtgtgtgtgtatttgtagcaggcgttctgtgcatgtgcattgtattcattatatgcacagaatgccagttctaagtgccaggcactacttgaacaacaaagaaaagagtagacactttgctcagtgtggtgaagaaaatcccctgtcagccctgaggatcctattacaagtctgaaagtgggcatacaaaaataattaagtttgtcttgaagttaggattagaaaagatgaatatttattaaagaaagcataaacattggattaattgtgttcaactttttgcaacttattttgcagctactccgttaattattgattgcagttttccttaagagacattgtttggcatatttatttgtgaagtaaagcaatttggattctcctattaattttacatagagaaattacgttggtatatcttgagataggaaggtacaaaatcaggacaggcttattctgccaggcccaatgtggcacatctgttttataagtaaacagaagttgaaattttatcttagataaagttcatcaaattttacttttgctaatacatgtaatcacctcagctatatagtttaagtattcaatgacagtaaactagtaagtattcttaataaactataaactgttaagtatttaactataactatctaagaaactcttaagtatttttaagcatggagattgatccccttcagggactatgaataataacttacacatttcatcttcagtccatctccccattatccacctaacactgccttgaacatggaggggaaaaaaaagtgttaatttaagaaaaaaaaaaaaaaaaaaaagctttggcatattccagggtattcatagtgatgtcttgagttattttacgaaacagttccaactgatttccagaaaccacagttgatgcataaattccctaatttgtttactttagagagatcatctcaagtgcagcatctgttttttgctttctctgtgcgatcttggttttacatcaggaggagtgaggcacagggacgtacaagagcggctcgggccacacaggcagctcctgaacctgctgtgtgctgtgtcaggagctttctgaaacagtggtgggtgtgcctcctgttactgctctgggtgggcaacttccacgtctgccttttcaactgtttctcaaggataaactccatctgccagataacattattttacaactagaagaatgtcacaactcaaattttgcttagtatgtcttattttggagaagcagctttcttctgtgaagctcagagcagtaacctaaaattactctcaatatgtagagggagagccttctggaagtgcagtggttatttatgaagcttgggtgggggagctccctgccatgttccagtgaaatcggagagataaaattttaatgttggaggcttttctaccattttgcttcttctgcagtccttgcagaagcagctgctataggaaatctatttccagagccctgtccaagcccatgcccagggtcacaggaggaggagcaccccgtagtttgtgatgttagtagaaaattcagggcattgaaaaccaggaaagtatcaacagcctccatctctgaaaaatagccaactgaattttctctcataaagggtggcccacgctggtcctccagcttcacttagagctcttgtaaagatgggcaggaattattgtgaatataaattcgagctgaagagaagagagggaagtgcagaaaatccaattaactgaagcgaaagtcatacagaataaactacccattgctaaaagaaataggttttaaattgaatgaatctttagagcagaattgatcaaatatgtccttattgtatgagaagatgcactttgcaaataatatttgtcgggaggcatcatctgcttgaggatgtttcatcttcttggtaagaaggccgttagaagtttggagcctttttcatcattgttattaacttgcaggggaaaatcttcctattccaatattcattaaatggatctctttgtgtatacaaatagtaaaagtagttttgaaagtactataggtaagcaaggggaaaaaatgcactgtttgtttcttcatagaactgacatttttatttagggaaaaatccatgaatttacaatctctccctttctaggtttttcaacatttcttgcaaattgtatgtaaatgaatgcaaataagcaatcctcactagcaagctgcttagaagtgtaaaatgcataaaattaagatactgagagaaacgtgcatctaattaaggtagcatgtaaagaaatgtttaaattcaaattagatacttcagtggaaagaatttacttgtttaattcaaaaggtgttttgtataattctgagaagcttgtccttagcagtacttccatttccttcaaagctccaaaaatcagttttaggagcttgccctggttcagttaaactttaaaattgggtttaagctaagaattggaatgtcataaaaatacgttctagttttaatgcctttacctcaaaaacagacttagagaggcgggcatgataatttgagagtgagagtgggtggatgtgtggatcactatttctatcccattcatagaaatggcacgtggtacttggatttcatgggttcttagaaagcctggagataacacagatcacaggcatctagttatccctggatcttaagaacattctaggagcaagacaggaaggatgccggcctgtgccatcaacagcccctccacactctgacgtccaggaggtcacctttactctttggggccatgtgagtccagtccaacctccagctgtgccagggacagaagaggaggagaggaatttggtctcagtttagaagcctattgtttaagtagatgaaaattttttttacgaagcattaagcaacaagcaaagtactgaagaaatataagatctgtgtggagaagacagaaactgtcttctaaggttggtgctgtttctgtctcagacacaagaaccaaaagggcagatagaaaaacaagcagggctggggacggtggctcacgcctgtaatcccagcactttgggaggccaaggtgggagggtctcttgaacccaggagtttgagatcagcctgggcaacatggcaaaaccctgtctctacccaaaacaaaacaaaaacaaacaaacaaaacccacaaacaagaattagctgggcatggtgacatatgcctgtagtcccaactactcaggaggctaaggtgggaggatcacttgagcccaggaggcagaggttgcaatgagccgggcactccagccagggtgacagagccagaccctgtctcaaaaaggaaaaaaaaaaaacaagcaggaaagtggtttttgctagttttcagaatgcctgattttgaagtgttccactgacctccacttcttttagtgagagttcttgctttctaccagatggcatattcctccaatttcagctgagcccgtgttttagcctgtaagcctatagtctctatttgctggcctcacagaggagaaatcattcattaagttttgatcatgtgcagtgtacaaattctctcttagactcaggttccctaatctgaagttcctgtctgtgtctgagctggggaattagaaaatgacgctgagactgttgttcttcactggggagttggatctgctctgtctcttcagcggggccaggaatccttctgaatcaatgccagacttctttcatcctccctccccctaggctcccagaccccatcttcacccccacccccacccccaaggctgaagcacagaccaaaccatgcaggactgtgaattgaaaagcatcttctggctggtgacatctgtttccaaatatccagcaagtctacttaggtttaatcagaagggtcacagttggtgtttcctccttgggccaggagatttttctcctatgggacttgggcctgatgccttccagtcaattagagctcctctccctctttgattcgttgatactttcagtggctgcctctcagccagtgactggttgggttagtgattcctctacttatagcacagactacatctagctgcccacttcctggataccccacattcaccatagtcgacatattccaaaatcagctctataactttcctctatagtggcttattctccgctctaaatctctcctggttaatgatgccattatcagccctcttctccttgcaaattgccaatgctatcactaggccatttttatttcttacctgagtttatgcagtagcctcctagctgctctcccatctcatcacacacttcctcactcctttctccacaccgttgatgaaacagctttttcttaaaacacaaatctcacataacatttcctgattaaagcctttctgatgctcccttgttaagttttttcctgtcttaaggggtctgggctctatctaacattgcactcatatgtctcctctcctccccgcattccacacaccagcctagttgaactacaggacccgcgagatgccatgctgccatttatatttttgtgcctttgcatatgctgttttctctgctcctccccaccggcatcctccaagttggcctggaaaactcctactcactttcctactcctcagagagttttttcttttctcaccctcccaggctgaatttgtcacgctctcttttgttgcattcccggcctctggttacagcatttatcatgcagtacactgaagagttgtttcctggtgtatctcccatttaggccatgggctcccaagggcagaaattgtgttgggtgagaaggtgcccagagataagactacggcagtgtttctcaaactttgtggccccaggatccctttacactcttaaaaactgttgagaacctcaaagggcatttagtttattatttgggtaaatatctgttgatatttcccactgaaatgtaaactgggaaatttaaaaatcatttattccttcaaaatgaacaataatgaacttattaagtattattataaaatacattttatataaataactgtgcagaataaaaaattgtaagaccagtggcattgtcttagatttttagaaatttctttgtgtctggcttatgaagggaagacaacaagatcctcctatttgctcctttagtcagtctgattcattgtgttgtttaatgtctgtgaagacaatacaatctaattgcagatatttttctggatcaaaacttgacaagtggtagtttcttactagttattgtaatgtgaaacctaaaaccttagggaacttttcttacagctaccttaaaaccgctcatctctcttgcacctccaatagcccttttgcccatgaatgttttacttataccatgcattggtcacttggaaaatgtgagaccactgagttatgcaaatcctccaacagatggtacactctgtcatacaataaaaaaagataacagaaatcttaattatgcaaccatcaaagtcatgatggtagacagaagttttccaaagttctgattttcacttgaaagctcaaattttatcattggcaacaaatactgtcagtggttttcctcaaagggataggctcattttgctcattttcaagaaaatggctttttaaatgcctaagtctgaataacaggtttttgtcagttgtccttttttgggaaaagtggtgttctgtgaagcaggtggctagttcagctcacaactcaattgcacaggtgcttttccttgagacaaacatcatacttcagtaggtcatggaaacatgtacttgccttctcataacagactatttaaaagatacttactcaggatcaggatttaccaaattaatacttactgcctcatccagggcatgcctaagtgatgctggcattgattttccttcaagtgctcagaggggcaaatgcagtgaccactagtatcgtttggtgacactggctgccttgatctgtgccaagttgccagctgttttgccccctcccctatggcgtttgcaccaccaacaaagtgttaaccccataaagaaggaaagaaatgtcttagcagcatttttaaaatttatttttatttttgtaatgtagagtcttgctctgttacccaggctgcagtgcagtggcactgttatggctcactgcatcctccagctcctgggctcaagggctcctcccctcacctcagcctcacaagtagctggggaccatgcccaggttatttattatttttatttttatttttgtagagacagggtctttctatgttgcccaggcttgtcttgagctcttggcctcaggcaaccctcccacctcagcctcccaaagcactgagattacaggcatgaaccatggctcccagccaagaaatgtcttagtatttttatcaaatacttttgacctcgtaaaacctctggaaggatcttgtagacccctaggagtccatagaccacactttgggagccatgggactgactggagtgaagcagaggcccctcataccaggttgcagagtccatgctgtgttgggaagggtgtggggggagaagtgctgtggtcagatttgtttcttggaatgaccatggtggcaagagagtggagcagtggagcatcttctggggagttggaaaattggaactgaacatcattgctggaaaaaaaaaaagcgattttaagttgccatatgaatataggatgattatgtaagccccaaattcttcaaccctttggagtgatgttttcattccaaatcacattcaagtgtgtgaaactaggttgaagtattttctggtattatttcagaatagtattatttctattctgtgaatgaatttgggtgtgtgtgcacatgtgtcggtgtacgtaaagcttgtatgtgcatgtaccgttggctggtgggtatcctgggcaattcttttctggcccaggttgtctttgtgttttgtcatcagaagtgcattccttagactctgcatgttatcctggatcataagtaaaaaacgtttgtttaccctaaagacctcccactcagtggaagcgtgggagacacattcctgagttaaaaaggtctagatcaatataatattcagaagtaattgcaagtgattctaaccaacccagcagtgcttacttaggactgtgttcaagagcctccttgcctctttgttgatctctttaaataccaaacaaaagacaatgaatcttccaactcaggcgattccattgtgattgatctgagccaattttttgaggtaattgatgatattgccttagttgagtctgttagtgcaaataattattaatcaatatgctctcagctcttagttcagaagataattctaacacatgatttatgctgaacatttcaattgagctacctttacaagaggaaaatcaattggcgagtgttctaaagcactttaattatctgcagctccacgttcctccgcagccatatttacccagacagctagttgtcccatcctagaaagggtcacaggaagtttttcatcgccacggtagagagatagtatatcgttcatcttagattgactatgttggtttaaagtaatttagtggaataccttaaaatcaaagcattgctgctttcctttggagagcataattaacattgcccaggaaaaagaaggaacgtgttactgatctccattcagttggaaaacagtttgccaatgtggatagtgaatgtcatgtaagtcaatttagccgtaaaacgtgaggagatctgaatcacagaaaggaggttaaggtgtaaaacattttaggggctaaatttacatcactcccctaaactgttgtttagattctttgtgacttccttgtgctaaggctttctagcatggaatttgttgtttttcccttttagacaatgtcttgatgaatattgtggtttgatttttcccccctgtgagaggagatgcagaagaaattaatcaccactaggaatgggcctgcctttgttcaaagtggagcttccaagcatctgtttttgttgtacttgtggtgggtacaggaatgtgtgggctctggcctgggacttttggacatgtttataacagatggaaattttaaatgacagttccctgcattgtcatggtggagccacttcaatagcactgagatgctctgttatacttcttgcccagtactctgtctcttgctgctattaaagcatctctaaatggtaaaacgtgaaggcatttggcagctttcaagggcagttctttaacgtctccactctctacccccatgtacccctgggacccccaaaacttggacccaagacttcacgtagcaataaactgaaacaccactcattgttcacagctgggccagtgctggggctccagaaggtaatgctcttaagcactgaattgtgagttcatactatcaattaaacagcaggagagaggaaagggaggttttgacttgggatttttgaggagcgaattcagtaggcatttttggaatgcctggcttggagctagctctacagggaagaccaagaaaaatgaagccctgcttttgcctttaggaagtcacagtcctgttgggaagggttggagtggagaggggagacctcagccattaagaatacaggagagaggggctgacaccagaaggtctgtgggcagagacagacggctgagtccttggcacccagggaagaggaaggagaggctgacgggtcacaggatggcatcttacatggccttttgaggttgccactgcttatgtcctcctcctgttccccaactgctcccctcattcttccctgggaatggtagcttactctgggctcatcagagggaaaacaagaaactgtgatacataaattctgcaactggttgtggtcctggtgatgacttcttccagaatggctctctcagtccaacagtgaggtgagattgagggtcggaaccattagggtacaatggtccaaattccagcctgcacctgaaaatcccagtgtttgggaatctgattggggagcatcctggaggcaggctgggtttctttttttttttttttttttaagagggtctcattctgtcacccaggctggagtgcagtggtgcaatcatagcccgctacagccttgaactcctgggctcaagccatctctccacctctgccttccagagtgctgggattacaggcgtgagctaccccgtccggctttagggctgggttttgaggaagttgtgtcctcgtggcctgagctttccttttcttcctgcatctcctcccctatgtgatgcctcccccctgctcgttgtttgggttgcagggtgagagagagaaccttctccaagtcctgactgctccctgggcccaagttcaggctgagctccttcactggccctgcaattttacacatgccgctcaactccttggaaacaaaggtttcctctctgtaagatgaaggtgatacgtaacccctggggttgtgagaattaaaggaggcacattttaaagcactttttaaactgtaaaactctgcaatataatgtgtaatatggatattcctatgcaaatataatataatataatataatataatataatataatataatatagaagatgttactgtgttcagttttattattttacctggctgcctactcagggtcctgtgatgttctctgtaactgctctagttcagaaatgaagcctcgagtaggaggtgtgggcactgcctgccctggcttctttctaccaaagtgacttagatgtcttggagctaaaacatgagaggcaaaaaatatcttaaagataaatgccgtgtctgtgttgcatataaaattcaataaatatccagtaactgttgagatatgagcccatgaacagaaaaaagaaaaaaaatccagtaaatgaaggaattactttaaaagatttcagtcttttccttttgtctttttctgtttttaatatacatgaagactaatttaaagacccttttctctttttaagtatgtttggagatctgtatgacaaattggctcctaacattgtataatactaatgacaggatatgaaagacagcattctttaggacaaaggaatgcagttttcaaagaccaataaaagttggcaaagaaatttgcagatcaggacccaggacaatgcttacataacctctcaactgtttttccaggtttgaagtgcaaataacagagataaagacagaaactacacatgtaaacttgatatattaatagctcatccaatctacataacaaaataaaccaggggtctaggccctaaaagtgatagccgtggtgttagatttctgggcctcctttattccaggggatggggctctgacaggtgaaacacagcatttgtttaaacagaatagagaaagtctgcaaaacattcaagggcaggaagtagcaataaatactcctctgtgcaactgaagcagcacagagcttggggtgagcagaatgtcatcactcaaagtagaatttggccagggcctcccagggtcccaccaagggatgcagtgaactttctaaaagtcaagacctctgtcttatctcctccaaaagatgagaaagtgagatgtgaagctcctttctggagatgggatatgtttttcatggtaggttctgatctcttttgcaggctttgagcataagaaccaagggcacaaaaatagctccttgagggaaaaaaaaaaaaaaaaaccgaaaggcctggaacacaggatgatgtgcaggcgttggtgagctggggttgtaaatcgacaatcccttgaacagaggaagacctagttaaagagactttggttttcttataaggcatgaataaacgctctgggcagtctgccccattggaaaacagaataatgctaataatttgcatttatataataccccccggcttgtggatctacaagcactttgcaaacattaattaattctctaaaccccctatgagccagggggtgccatcagtaactaatcacgaaggagggcaagtgattcttgacagagtggatatgcaagttagagaacactgcgagcttgggagctgaagaggttgagtggaatttttatgagaaagaacaaccaaggtagaatgttgatcagactgtgtgggaaacaaacctggatattatgaccataggtgaaggctatcaactaacaattcagttcctctcctgttgttcgcctcttcattttcaaagctctgcttatacttggtcggaaacctcagtgtgaaggtctggattcagttcactattcccagtataaaaggatgtgcagactgagcacagtggctcacacctgtaatcctagcacttcaggaggcagaggcagatgggttgcttgagcctaggagttagagaccagcctgggcaacacagcagaaaccctgtctctacaaaaaatacaaaaattagccagccatgatggcgcacacctatagtctcagctacccaggaggctgaagttggagtgatatggctccgatgactggaggaaccccagggttcttggtttcatgccgataggattaacgacacgtacatacgtggagtggttttaaggagggcaaagtttaataggcaagcaagaaagaagagaacagctcccccatacagagaaaagggaggggggcttggaacaaagagaaacccagtgtgcggcagaaaagtggttgcttatattgggatgctggaggagacggtgtgttatttacgtagccccgtgaaaacctggccctcccaccttagacttttaatatgcaaatgcagacgccatgatgttttgaacacatggtgttatccgcaggtggccatgacacttggtacacctggtgagaagagggcgggaatcaccatgttggccgtgttaggtagacccagtttctactcgcctgcatttgtgtattaaagcttgccagcctggctcttcaagctgcctttctgttagaaaagaaacagtttggaggttgcttttattaaacgaaaaacccttatcaagaagtccttttaccctttctatctgcctaaaaattatttcttaataactcctgtattaggaggatcacccgagcccagggaggtggaggctgtggtgagctgtgatcaccccgctgcactccagtctgggcgacagagcaagaccctgtctcaaaaagatatgcagcagctggatcatactagaaatcagtatttctgttgctgtgttaatagtcagttcagagattcattcatgcgttgacttattcactcagtcactgctttatttgacagataggagtttttgagttcttgctccccgttagacttgggggttatcccccaaaggcttatatatgagaaaagcaattccctgctcttggtctagtggctcagtgatactttctttcttctctatcatgtattttttgtttccccagtctgcttatctgacatagatgttaggataattgaaatgtttttgcaatgttgatgtaatttatgagtaaacattgctgtatatatttgaatttctgatgagaaagacactatgcacagaggagagtaatgacctggcgtaagagaacccatttacaccaatagttacgtctcactaaatcgggcctgttagattaaaggactgttggtattcatgactttttttttttttttttttaagaaatgtagtttgaagctaaaccaacaaagtgccacttattggtggtactgagggagtttgcatttactgaatagataagatttgttcgtgatcttttggctgatatcacaatggaacagataggttacttttcaggtcctcaaaagttggatataccaggtgttttccgaaattgattctcattcttgtagatgtcccaaaaattcaagtaatttgcacaataaacctgtataaattagtagaaaagccaatttcactttagctctaagtggtaggaatcaatggtatatgaattcttgagatgtttttatgtacacacacatacatctctactaaagtgtaagtcagatgaagtggatctttttttgttaaatcatttttatgttactttcgagttaactagtatatgtagagaaatctatgtgtaaagaagtatcaatatttctcttcaagtattttgaactctaggacagatgatgctaatgaggcccgtccttgctggagctgcctgtcagaacagcaaggtaggcatggcctggggcaggggagctctgtctggtctgtggaccatcaatccagcgctcggactcctcctcccagcaagacaagcactttctttcaggctgctgccagctggttttgctgtgcggtagtgttaagctttccagattgaaaacatctggcttttcatcagcggtatagactcagaaagagagcagtgttagccgaagtaaattcaacaaattcttatctgacacgttcggtttatcctaatgtgataaactggggcagtctctgaggatgagtcctgtttccaactgtgcaccttttccctctatccttaccctgtccttggaagaatcttgatgttaaaatttgggactgtgtctttgttggaggcatcagatgcactgtcggtagcgatttctgaaagtccagagagtcatttgcatagaggtcaaacacaatatttcctgcaggaacttcctgaatgatgaagtttcagagcaatcccatgtaaccagatgtcagcaggttccaaaaagatgactggctacctgttgctgttacaagcaggagacctctagtgttaactaatttcagaggaaatttgtaaatattaagaatagaaaactgtgtatgtatctactcaacacatattgagaaaatgacagattgtggtgatgtgacactttgggttgtatctgccttttgaaagcatcctttatgttttctcactcatttcttctacagcactttatatggcttggtagggaaattctgagactaaaaattaatatcatcatccctctgagtttttgcatatgaatgcttttcaacttgcaaactggtcgttatacagatacgtatttttgaacagtgatttacaaacccaacttttgttaactggatcatagcttcccactgagttaaggcttcagagctggctgatcagtgtttatggttggtctggtgttgtcattggtctttgcactttagtttgaagtacctcaagaagttaatgacctgttaaaagaaaatccactacagaatattctccttaaaagatacaggtgtaagccaggaatatttatattgtggtagcagtaatgttgcacaggtatagtgtgtcagttgtacatcagcacaacagtctatcaagatggtagtaattagccccatgttacattaaggctcagagaggtaaagtagctcacctcaggacacacagctagtcataagtacctgtgtttgttgctcccctggtgaccaaaaatattgggctttgctcctgttccacaagcgcattgggtgttgctccagggcctttgcacttgctgtgtcttctgtttgcagttctgttttctcatgttaaagaagtcctttttgtcatttagaactcaactcccctctctttagagagctcaagcaggccagcacttagactcctcctcccagcaagacacgagggcagttgtttccttagattcccattgatttagattttccacaaatttgcacaaaactttataaattagtagaaaagccaatttcagtagtctagctttttccaagttgtaggaattaatggtatgtgaatttttgaggtttttatgttcacacatgtatgtttctactacagtatgagtcaaatgaaatggtttaataattttttcatgtgttaaatcatttttatgttcttctcaagttatgaccatgctgtcacagcaaaatggtgtctcaaacccactcaagagagactccttcctgcagttacctagaaccagcctgtctcatctctccgcctccattattgctatcctgtattaataaggagttttataaacagtgtaatttggattgtttgcaactcaatggaaaaatgcttgaaggggtccaggcgcattggctcatgcctgtaatcccaacactttgggtggctgaggcaggcggatcatgaggtgaggagaccgagaccatcctggccaacatggtgaaaccccgtctctactaaaaacacaaaattagccaggcgtggtggcgggtgcctgtaatcccagctactcaggaggctgaggcaggagaatcgcttgaacccgggacggggaggttgcagtgagctgagatcgtgccactgcactccagcctgggcgacagagcgagactccgtctcaaaaaaaaaacaaaaatgcttgaagggatggataccccactcttcatgaagtgcttatgtcacattgcatgcctgtatcaaaacatctcatgtaccccataaatatatacccctactatgctcccacaaaaattaaaaattaaaaaaaaaataaggcattttaaccacagtccctcctaaagcacacctgctacctgcacatgtgccctttctcctcttttgctttttcctaaaggacatggttgagaaaactgctctattaaaatataatatggttcagtttggtgtatattgtgattattttatttgcttttttaccttggactcagtcttctcctttcataaacctgaatatgcatgttgtgtagcttcgctggattcaaattagataatttcatttcaaacagatacagccaagcatatggtatttggtatgagttgtgcaaagaaagtcaagttaggttatgaacaagtgagttctgagtttctttttagcgaagggacatttatttatcttggattgttacagcgattttctggactatttttctgtaattaccttgattaatatttaagtggtatgtttacattttgagttgatttatatgaagctgtgcttttcctccactgaaacactcaggtatctcatattaccatgatgatagaaaccattctctgctccttgctttcccaatagaagaatggcagtttatccacgggtatttggagaaggagcagcattcacacagcagaaatgttccactggagggctatccttccagagccccttgctagttatagatacctccacttagggcctctgtgacctgcaataaatttaaaaatacagtctctaaattttatatgtgtgtgtgtgtgtgtgtgtgtgtgtgtgtgcgcgcacgcacatgcgtgctataaatgaattccctatatgctatttctgtgttagaaggacagggagaaatattgacgtcttttcttcctattttggtattttcccttgctttcttctctgccttcctcagttcccctgggaggtgaggcatttggggcagggtcagtgtgtttgcctggtggtctgggtgaacttgcagaggccgtcagccatgactcagcatcaagtcctgacactaattcttgtttcctgtcacatcctaaccaagtcatttatcttcttggaacctcaattccatcactggtaaggcagttatgataatactctgggtccttgttaaagttatgaaagcattctattaggtgaccactaagcaaattatgggaagttaaaattattgtatccattatcaccaaattgttttttctttctaccacagagctttctttctttcttggagctggcaaatgtctactcctttgtaggtcccaaaccctgtgcctaaaggtttagcatctctgtgatgagtttaatggaggcaggaccagtctgttctccgttgtgattgcagattttgaggagctattttgaggaggatccaggaggtttactttcttatccctgtttttccttgggatcaattcttacgctaaaggtcaatgtttgtgaaacatgctgtccctcctgcatttcttttttgcccagggacatttaaagtcattatcttgccttgaaaagattaaaaaatgttggcacctccgtctttgtggtgcaaagtgatcttgggctgttgaccaagctgacttgatccctggaatgtcttgatctaaattcatcttttcttttgttgctgaaagtttagggtttccgcttgctgaaattggatttatgaataaaagaagccaactttgctgtaggtaattatgtcagaggcaagttcatcggtgtcagtgttcattttattagagaaggcttagcttattcacaatgcatcttttatccccttgtctctaataaatgcatgattttcagagatttgcagccaaaagtgtgttattccaattaggttacttatgtcaaacataaacctttcctgtatatatgttatttttttacagctaagttcagtagaaaatccttatgcagacattgatatgtatattttaggttatgttttcctgcaatagtatgtctctggaccagtgatagtaatttgtgtcaataactttataaagcgagaagcagttgaagaaattagaacggctgagggccagaagtcctcagcagggaaaagaaacacacgtgcagcagattaaggggaaagggccaaggaaagcgaggacccccactttctggtgtctctctggtaactggaagggcggatatgagcggttcgcaggcaccagtctttaaagcgcctgtgatgttctcctgactggcgtgggcttcctgccctttcaagagaactccttgatcatgcattctactaaaacgaggcagccctgggaggcgagtcttgcgttctaattgcccagtgggttgaggtttggggacaataagtggatatcaaggaaaggtcagacttgaaagctagcaacccagtgagcagaccaaatcggagagaacgaagaatgactttttttcttcttcttaattactttgtctaaggtagagggtttccttcttaaacattttgaaatctggctgatgaatacttgtcaaactgatttggggggtatttgtctaatcttttatcttattccatcagatcatgaatgaaaatgaaagctctgaaagagttttgctcccaatggaaaaaaataatagcacaggagctgcatagggagatgaggaggggctggaaaagtcatggggtcaaagcggtgcacagcacatgggttattttttgctactaccttccacatctgctgggctatggtgaaatttgaaatattttatattttttaaatattatatatccttttgctctttcttgccttcagcgtacctgtatatgttagccttaaattgtaagaccaagacatttataataaaagcaaaataatagtataggttccttcaatgagagggtaaatcatcccatccaaaccaacacacacaaacacagaccccacaccgacacacaaacacacatgtacaccacaccacacacaccccgacacacacacataccctgacacacacacacacacacacacaacctgcttctcctaaggaaggactttaaagagaaaaacactcttgattgtgcacaattacaaatcactttccattgacaattttgtaaccaaggaaagccctgggagttcagtggctttgtcatttagagttttaccattggctgactttgatctccacagcacagccttgcttactcctttgcaagctatattttttgtttgtttttaagtgtagtcattttctgatctgattgcaccagcctttccaaaacctaagtctcttaacccagaagtccaggcctctttctaatggtgctggaggaatgattggcaagcctgagatccgggagtggagattatagggaacggtacaggtggcaggagctgccccagagacaaagtcaacaccactggggccattattttcgttggaaatgcgtaagaaaaccattcctcaaagtggaaacaataaacacattatctacttccaccatcagctaattgaggctgtctctcaataaacaagtggattttctgctaacaagcacatctgtctacaactttaatctcctgtgcttttctgccctgtccccgttttatttatactcattccaatttttcttaataatgttacatattagacttaaagtctctccttttgcatcctcttggcttagaagtcagtgactgccattttattgtaggacaatttttaaaattgaaattaaaattaaatttgtttaactcttcattttcttggctctaatacgtcaaagaagggagcccaaacgcatagaaaacctagtaattttagtggcatgataatagcctcctttttttatactgacaccttatggtaaaaatcatgtcaaattagaatgatcacttttagttcaaaaatatgaaataaagttttagagaaacatatttgctaaactaattacctactaatttatctatttgtgaattgttctcagtgtgtgaagaatgctgagtgactgaagtcaccatttgaaaattgtctcaattcagtaagaagggaagagattgttatgagtatgatgcaggtagcttaggaacgtaaacacctgttctgtttagcaatataagggggtttgaataaactgacatatggggatttaacacttaaattgttcatataattttactttaaaattctcagtcatcccataaaactgattgttttaaactccctttcctatatcctataatattcactttgtatttccttctaatacaagggaaagtacttgctttattagcctctttaaaatccagaacattcatttattataaattgtctgatacttgaatgtctaaataaaatatcccattgcttgcctaaggaatatttttccccaggtgaaaatatattttactttatgtgactgtgatgataaaattgcttagtatactttttgagtcaaaaattcatgtagacaatttaaatgtgcaagtttatgatccagtctctggggcccctgcattggcatatggaagcatatttaagtttatttttaatttcctttatggctggcatggtttctttgggttctgacacaggcataagcacacacatgtacacacacactagcagaaagcataaacagggctttcccaagttatccaggcaattttctgaatgagttgcaaaactgaaattaatatctatctttagagtcttcaaggacaaaagcacatcatctgccagccctgctcgatgcttagctctccatgaagttaatgtgggttttgtgtatataaaggcaaatgattcttttttaccatgtgcagttaaatcccataatggtacatgctccgatttaattagttctcatcatataatgggatgcagccagattgatacaattaataatgatgttagtaaaaacttccccattctagatacgaggaactccaggtgtcaaaataagcatgtattaattttaaaatacaatgaattggccttaagaagaaaaaaaatacaatgaatcttaaattaattttgaaacgaattgtattataaataaaataacagatactgtttttcctgtgataactaaaaagatggtttcccattatcagtgtcattatttttttccagtaaaatcatatatacaaccataatatagaagaacaatcaaaacaatgttagtttactagtatacatttattttaaggtcaaagtcaccacatttatttattcttaatatcagcctttgagaatattgaggcacctctgtagactcatagaattctgagaaatattgtttgaaaaattatcatcttctggatagaacccaagctctttgatgacttccttacttcatccacaacctaaatttttgcctgatactgtcccttttatgccagccagacaggtggcctcactgtgcactaagcaccagggtttcaggactccacgcccccgaccttgaatgctcttcccctctttcttacacatttttcctgaccttcaatgtgtaacacaagcatttcttttctgtagtgaatacagtttcataatatctcttgcattgggatccttggctctgtaaactacttacctgcttatgtgtgtacatcttatcttcccatctagattgcaagtgtcttcagtaaaaagtaagggaaaaacacttgcactcttctcaagctcaacctaacgcagtagtcatgcatatagttgttaattctcaccggatgaatttatgatggtagtatctttccgaaagtctgttttgagcagccccactagaatagagcacctaagtgtgtttctagttggccacgtgtatgctgaagtacattttcctaatgaagcatcgttatgcttggtgacatccctgacacagaggtttaacggtccatccaccagtcagcacatgttgctttcatgaccaaccatgtaacatgctgatatgaggaaatcatatcagatcttgccttgggggtgcagcagtgtctaggtaaagctcccttggtgatagggacctagggccttgggatttggctgtagcaaaactcaaaacagagatgggagatgatagctagaattcctggggccacattcaccagttaaacttcttcatttgccttgggcatttggcaaatgaagccaggagctctgatgtggaaaattagggcagtgactgggtggcttattcagtagcaggtgtgtaagctggttttctagaagctggtgatgacctgcccttagagaggcagtcaaatcagtgtcttcctcttagaaaagtgagaatgatggctgggatgttggagggtttgataaacacttttcctagctttgccattgtgatatacaggtgtggtatatgtaaaagttagtttcttctatacttcagtttactcaagaggaaaattatagcattcttcatcttaacaagatccctgtaaagttgcatatatgaaaaatgggccaggtggaggaaaaaagttacaatatttacatcaagcctgtggataagtattacatgtgttctcagatcattggatgtttttgtatgcagctcccaaagttcattcctgtcctcaaaccttgatccccactgacaaacagaactgcatttattacaacctgaacaccacaaatcctggtaccgtggacatgggtttgcttattgcatggccttgaaatattacaagctgaggtttgccagtactctggttattcaggatgtacagtttatttcacagtcaaccaggaagccatgttgcaagacttcggggtttttcggaaggaggaagacacagccgatacccgcacagagattcagatgtagttgtgaaaataaggcatccatatgtgcaaaattaatgcctgcaatagggctagacgattcctgactaattagtcatgcggtaaacaaagaagtgcttgaattcaaaacaggcaatatctctgatgtctgaagtgatttggaagatttcataaaaggatttcccgatggagtaggatataaactagtagcagagcaggtagtgatgaatatttactgtttcttatttgttttctcattgttcatatgtaataatgaatacattactcattacttctaatcagtgaatattgttatgtaaatttcacagcaattatctgtacctttttagcaggatattttaactcccatttatgtcattttgcttgggtgggttttttttttgtttttttttttgttgtttttttgtttttgtttttgtttgttttttgtcgccaaatgatgaatctcagaagatttgtaacagagcataaactgacttgtgcagtgagttgtgacatacagcatgggggatctgagtccttgctactcaaaaggtggtccatgcacagcagtctcagcatcacagactctcacaccccaccccagacctgctgaatcaaaatttgcatttttaaaaggtccctaaataacacacgtgcacattacatggaagaaatcactcgtctcagatatttgcattaagcctttagtgttccattctcattctgttatgttggagctttttataaaattgtgaaggtgggtgtttaatctctacagatgtaattttctctgagcatgacacattatttagtagaatgaagttttatagtactatggatgagtgattctgaccgtagttaaaagtttagtgaatacctaaactattttcccagcacttggagtttttcaaaactcaagtcatgttttggaaaacactattttcccttttatatctaagcccatatgaattcaattttgtggaaaatttaagccacatgtttctgattcgtttacacttaacccttgagaatgttgtgttgcaacagcaattgcctgtccaaaaaaatctctttttagtaaatctttcacaagggtagagagattgggaaaaagagaaatgggaagaagtcactgaaaagacccagagaagttgggggttgggttgaggactctgaattttttttttttttttttttttttttttttttttgagatggagtctcatctctgtcacccaggctggaatgccgtggctcagtcttgactcactgaaacctccacctcctgggttcaagtgattctcctgcctcagccttctgagtagctgggattataggcacacaccaccacacctggcttatttttatatttttagtagaaacgggatttcaccatattggctaggctggtcttgaactcctgacctcaggtgatccaccctgcctcggcctcccaaagtgctgggattacaggtgtgagccaccgcacctggcctgaggactctgaatcttgatacaggactgtgcagattgtatttgtgaataacttcttttctgacatctgagggaggacaggaggggtaggaggaccatgtagtctcatgcgttgaaacagtggacgcacagatcctgcaacattgtcaaaatccatgtttttactaaacatacattaatatttctttctcttacttctacaagttaaattaatatcactttgtggaatttttggttttgggctccagcagagatctcgtccatatttagtattagccagcgtcttagcaatgttgacaaaaggtgagaggaaaaattgctgaacatgatgctgcaaaagcctctctctatgtgtgatgaactgaaaaaggcaacctcgattatcttttttgagcgtttcagtttgagctgatgcataaccagggaatgtaaaagatccgttaaccttctttttgcctttcagtaaagcttgagttttagcttgtcaaattatacattcaatgattgtatggataccatcttttttgatggatggatagtgtgtataaacgtgtgtgtatacatgtgagactatatgtcatgaataaagagtgagtgtttatggtggaggaaaacaatgatcaaattaatcatgttttctatttagacatctatccctaaatttagtgagtttgtttagataagacgacctggcttgattacagctctgagtagccattggtaaatgaaagagcatttgaattccgcgtctagcacattattccagggagccagcaaatacatattcatatgacagatgcactaatcaaggctgaaggtcttacttaaatattttaaaaagcaaccttggcagtagaaggcaaatagaactagtctagatggtgtttttgccagtttccctcttgctgtaggctttctcataatcctcttttgttgtgacatggaatgtctttaatcatgccatgccctttatctagaaagatggcttttctccccctgcatcagctgcctctttccttctaggatcaacccagtgtctgtctgtggtccttccctgggcccctctgtctagggtcagtgtctacaatctgtgcttcccacacactctatgcttacctctatcctgatgtttgtcacagtggtatataattaactgtttacatgccagtcttccccagggtagtctctgtcttgtgcatctctgtgtctaccacctaactcagaggaggcactcaatgaagttattgaattaatagatccatgactgaagaagtttcctaagggccaggcatggtgggccacacctgtaataccaatactttgagaggctgaggtgggaggattgcttgacaccagagttctagaccagcctgggcagcatagcaagaccggtctctacaagaaattttaaaattagctgggcgtggtggtgtgcaactgtagttccagctacttgggaggctgaggcaggaggatctcttgagcccagaagctggaggctgcagtaggctatgattgcaccactgcactccaacctggacaacagagtgagaccctgtctcaaaaaatagcaacaacaaaagtatcctaaattagctctgaaaagctataaacgtctaataatgtcaaacttgagtttgtggattgagtatatgttaaggattctgcaagtgaatctagtgttgtcagctcatgtcacacagaagctgagccttgcttctctggttacaatctgggctcctctttgctgggcaccctgcagatacatcctgcagggcaggggaggctgtctaaaagaagctggtggccccctgtggccatcattcttagagagagaaccccaggcagaggtatccagggaaccttcattcaattgtcggaacttaatgccataatgccttaactgtggtttccatgagtctatacgtgccatctttcactccattctttaggttgttgaaactgtatcccagttttaaagactttcacagatgacatcttcatcgtttccttctctaacctgttccatcgtgtgtttaataagtctttctgtcagaaaggtattctttttctctcatctaaatccccacatgcccatttttctccatttggtccctagtagtgaggaggaacagctgaccacctcaaagttttcttctctgtccatcccctggctcatgtatcatccccttagggttttcaagtttctcattatatttgtcagtaaaactaagagatgaactttcaactccaagtttatcaccagaatatccagcttcttttgtcatctcctgctctcctgcgtgtcttctcccaaactattttctgtttccttttgtcaccatcatggaaaacggaacttattctttcactgtgctctatattttatcttcttgtgcaattgtaagcatcttgagagtaaagattgtacagatcttctttctatttcctgcaatgcacagcacatagaaattgaatttcctggcagctgtaactgtctttgatatacctagccccggtttgtctgaaattgatcaagaaatgtagccagtaaacttaattcctattcaaaggggaaagtgtgtactgtgtacagaagaggcattttacatagagaagctcagcaccaaaatctaatgtgcaaaagcaagatgcagagcagagaagattctgtactctacatttgagagctctttatttgtcaacaaggcagcagatatttctaggtagcgttggtgcaatccagtatagaaagtggatttgttggtattacacataattaggaagcaggaacatcagtaattactgtgagaggattttgtatggcataattaatgccctcaaactatttagaaattcttagatgaaagaaaatacagaagtgggaattttggtgttgaaaagacaaaggcaaactgtgttggaaatatgttaccaaacatcatgttttatgagcacagattggcaaaacatcaggacacagctgttgattatagctgctcttttcagtaactgcctcagagccaatgaatccttcgcggggagggcctgtcaggacatatcagagtgcagctcctcgccctcccaatgacttaccaaatcacacgcctgccctagagagacccaccagtgtcttaggaagtattggctaaatggaaccacatagcaatgtgtggccttggatatttaacatcaaaatcatgctttggcaagacatgttggcatcactcatcaacaggctctcagttctctggattaaaggcaaaaaataaaataatcaaagtcactttaaaattagtgacatgttttatactaagataattttgcagaaaaactgccattttaaatcaaagtacgcagcaagggagtgatctactaggctttcatatcaaatataaaactaccactaaataactgtttctgaaacttcatgtgtagtttatcatatattaaattattaacatttctgttggaggaggtatttttcataaaatatttaagcttcacatctcagaacactatttcaacaacagataccaaagctataaaatgaatgttacagttctatcaaatattcagccttttcattaaggaaaaaaagaagaaaagaaaaaaaccatattaagccattactatgacacgacctttgctcaaaaaaaaactcatgtttcaacataaccctcttgcacccctgggaacatgaaggccagaggtcacccttttttttgttcatggtagtccatgatttggggacatagggtcagtggatatttcaattagtatcaagagttaattattgtatcagaggacacaaatgagaagctatcaaaataatttaattagaaaacaaattagaaattaaatacatcttataaaatgaccttccattcctagggcagagacacgttcaagcgtaaacaagttattctggctgaagttgatagaataagcttagcatatatcaaagaaaaaactacccttaagcaaaacgtttttctattttattcggttctgctttccatatgcgttctcatatttttttcatttcagatgttcttccttacatatacctaaatattaccttttgccattttctactgctaaccacagaagtaacttcaggacttgagggttttgggggctttggggtgttttttttttaatgtttcatatttcttcagagaaggaaaaagtcttgtcatttatggagcaccttttcacgaaaaccacgcagtgctgttcctagtgtagaccattaaagtgaaaaagcattactggcagactaattgtgtatggtgtagcatgcagtctatcacagtaacccatcacacaccaaaatgcacatgccggcagacccgtgcaacgatggttgatgttcacagtgaccctgaggtgttctgtgtaattttgagctaaggatactttattatagtcaaactttttggaggtaaggtctatatgaatacttattagtgaacagcatatagttggtcattgtgggtaagtgggagatttccttgacaggttattccctcagacacacagacccaggcccgtaagcggcagatttagacagcagaaaatccaagctcgacgctgcagcaggcgtaactctttagtggtacagcaggtttacatcattactgcccagacaaattggtcatgcgtctttaatttgttctcacaaatcactcccttcactagtgtgatagttttgttttgcaaatagtgactctaacagagtgtatagtttcagatagaatatttggcatgttgatgctgaatcatgccagccacctttccttaaggagaaatggaggaaaaaacacaccttacaacaatctttaaggttctcgtttagttggtgttcttaaaaaagaagtatttaaggagaattataggttggctattgtgtgtgttgtgggggtgcttgcttggtgttttgtgagtggacactcatcctggaagaaggaaggggcatcgggcagtcccagccagggtacatgggtgtagagtcctttctgaactctttttttttttagacaggatcttactctgttacccaggctggagtgaagcggcatggtcatggttcactgtaggctcaaattcctggactcaagcaattccgcctgcctgcccccgccttagcctcctgagtagttgggactataggctcaccaccatcccccagctaattaaaaaatatatattttttgtagagacaggatctcactgtgttacccaggctagtcttgaactcctggcgtcaagcagtcttcttgccttggcttcccatagagctgggattacaagtgtgagccacctcgcccaggcctgagctttttttaatgcacgtgagatttctggtgtttgcttatgtcagggtcaaatggaactttgccttgagactcagagaaagaattaacatccatcaagacttaagaaagcatagtccatgctttggaacacaccaagctctattgctaaatttaattttgttttctaattaatttttttccaatagaacaactttttcaaagcttcatattttatcagcaataaagtacttcatatctgtaagtccaactcagtgaatctgagggaaggtttagggaaagaaagaaacaagtgactgattttaaaaacagaatagcgatagcattaaccgataaagggataatagaaatagaggaaggttagtgagaaatatagctctttcttgtatatgtatatttcaaaatgttgtcaacatattcaggtgaaacacttaccaggtgattagaataatggttgtgttttttagatgaggtagatttcactgcatgaaaatgaccattgatatgggatataccagccaatgaatgagaacggaacaaacaaagagatgtaaaagatgagcagtaatttgggttgctcctcaacaaacatggaaaattaacgttttagtcaacaaaggagagccagcagggtcaagttctgcaagaaatgtgaagaccaaaaacaggccactcactctattaagctgttagaacatcatttgagaatgcagtgggagcttaaggccaaattgttgggtgttgagaaggcagagaggggtggcactggctctgtgcattagccttgtgcaagaacaaagcggtttttcctcttggggcacgaggacatttgtctcccagtggcaccttgcaaaatgctagacattgaggaaaattccagtaaacacatggttctggctcttaaaatttcgaagtgtcctgattttaatataagaatgttctggcatgctagagatagtgatggcaggccacagtaaaatttctaatatcctccacattcaaaagggaagtgaagaagctggccagctcagcagacactactgaagggatggatgtgagactccacgtaagttaaaattgagatcagttcagctcagaaaagagaaaactgggtgagacctagttcatattctcagaggtgcaaagggttttataaggatgagtctgacaagttttccccgtttctccagagacccaaataaagagaaattagttgaaattaaaggaaccttttttttttagtctgtatcttagaagataatgaaatgttagggtggtcttctaacaggggccacaaagaatctttaagagaaaaaaaggagagtctagtatcaatcaacgttaaattatcttacatgcagttggctgaagtgacaggtcatggccaggtgatttcttgagaaccttttcagtaaatgacttgattactattatgaatacatttagtcagtgcgcttcagaaatgctattgcttgttttcgctcatccccaaaatgactatggaaataattgtatatgtgtgtatgtgtgtgcgtccagctaggagggaaactacaagtagtactttctgatttttgaaaaaagaacaactttacatacaattcagttttacattgtttctgcacaggaaaactgcatgtcgtcttctgctgtaactataaaacacatccacaaaagttgtcactggaatttgcttaaatgtttctcaaagcagaaaaagaaatgactggtctctggttcattcagacgcctgcttatgatcacaattctgttgtcttacgttgtcatattctgctgagaatagttcaacaaatactactcttagttgaaagctttagaattttcctttctggaatatttacagatgtgacaaaatatatttgttataaatgtattcttatcatatcaaatgacctgaaatttgccatttttgattaattcctggagattacaagaatgatgagggcagttgcattcagaagttgcatacagttgccctttgcagaagtacatggtgcacatgcttcagtgtatttaatgatgttaacagttcattgattaaagttcaccttggaaataaacaaactttcctattcatctttcaaagttgttacaaaaacagaagcaggttttttttatggccaattcttccttttcttccttagttggtggctctttgttttgaattcccatagtagctgtttatttttccgctttgcacaatgtctgtattagtgatttactactcgctgtctttcacaagacctatgagcgtggtggtttaattaaccatattttgtgcatgtttactcttgacattaagaaaataataataattgcttaaactaacaaatggaatatgaatccagttgagttactttgctccttgttacctcattccctcaggtgtttattgctcttgtagccatttgatgtgaataacaagaattcattatttcagagtattaatgttactcattggactccttccttcttccagtagatccttgctgtaaaacatcctggattctcattcttctgcctgagcagttcccccgtaacggtgcgtgagcagatcacatctctctgacagaagggtttgcaaactatgcccacagaccagatccccagggctatttgtttatgcatttcctgtgaccacttttgcagtatgatggcagagttgagtagttgcaacagactgacccacaaggccaaaaatatttattattagggcctttatagaaaaagtttgctagtggttcccagttccgctgtaaaggattttgtccctgtttctttctagtgtgatctccactcttctctctttttccgtggttgagtgttctgtgtcccagccaaaccgacattcctttctatttaactacaacattttgcctgtgctatcttttcatctcatgccctttcttcatcttttcaaattctgcttctcttttaagaaccagcatatatgccacctcacccaagaagccttatctggttcctccagcttggatggctctaatcttagtctaattgttttctcccacgccttgtgggtgtgtcctcccccccaccggctgtggagtggccgggaacacaagcctcctccccaagacttaacttcctaggtgaatacgcaactccctcccaggagtggtggccactctaagtcctaccaagggtattggactgaaacgccattgtctttcatgtagtgatgacaagtcatttgtttctaaagtcaaaaataattacctagtgtaattaggtaattatttattttttatgtaattatgtaatgtaataatctacctatatgtatagagcattcactcagaaccctacttgctgatttttgaaccatgtccagccctgaaattatgtggtttcagattcccgtgtggtggtggcatctatctgggcagctcctccaggagttgagggagtgggtctgaattctcacagtcctgttggaagtgtgtggccaggctggttcctttaactgcccattagagtacactttccttccttgtggggcccttctagcctatcaggtcaaatttttgtggagtttccttactagtcatttccatttagttcacaaaatcagaattcaggtgaatgtagcaagcttagctcaatcaagttacactctcttcttctctttcccagcacataacacaattctagttgatttattactagcacagttgttctgtaagggcaggaagcatactcttctagtgatcactttatgcataacacatagcatagtaggcactgccaaaatgcatataataacacgaatatgtgtatatacatactcacatgtgtatgtgacacaggattttttaaactccttcactcagctagttccaggttcttgtctcacgaccacgaaaaattaggcatgcggacatcgaagagtgagtggaatagaatttattaaacaaaaaggaaagctctcagcaaaaagagggatcctgaaagcaggttgccagttgccccccttaacagttgaatacgagggcttctatatatccaagctgatggcgctgggttccctgtttgtataaggtttgaattcctggtggctccaccccttccccccagtgtgcatatggtcccttagtctgctctgggcgtgttcaggcaaactccctgtgcaggttgccttatctgcacaaaacatgtggtataaatacttggggggtgggtcggagattcttcagggacccttccctatctgcctaggagagttctctgcctcctgcctctatcatatgtacatatatgtcatgcatttccaactacaatgactatgtttcattcatatttgtatttcctgtaggcataacactaatattactgacaaagctggtcccacccaaatgggctctttccctgtttggtgcttcaaagctagtacacaaaactgaaagcgtcgagcagtgcaggctttaatcggatggccatggaattgagtgggcacttggatcacagatcagcttctcagcctgtgagagccaggaagtcacagatatagggcatctttaatgaatgggttgggcactaaaagcaaagggaggaatgttcgtgtcttgaaatgaacagcgaatttcttggaaccagagttgccactttcctttttgttcttttatgtttttttccagctattgtcatagtgattgtcaaccgtcatggtgctggtggaagtgtcatttagcatggaaattagattataatgaagttagaggttcttcagaggtcaagtgggccagcatcttgggatttccaccagtcttggccagtttggttatgcaggggatttgacttcaggaatggtgtttcctaaagtaaagcagaattaagaagctgatctgtgatccaagtgccctaggtcatgtaggcattacactgagtaacagtgtaatgtttactgtacactgttaaaatagttgaattaatccattctttactctcttagcattgaatttcagttgagcactccctccccactcccctcttctccccatttcatgctaattctcactcgattctcttctttttttttttttttcaagacagggtctcactctgttgcccagcctggagtgcagtggcacagtcttggctcactgcagtctcagcctcctgggctcaagtgatcctcccatctcagcctcccaagtagctggaactacaggtgtgcaccaccatgtctagctaattttttaaactttttatgtagagatgaggtctcactatattgcctaggctggtctcaaacttctgggctcaagcagtccctcaaagtgctgggattacaggcatgagccaccacacctggccttgagtctcttttctaactataatacttcttcctagttggcactggcctaaaacttaacctcatatgggataattaaatcttcctctgcatgctccctcagacctaggtactataaacaggttccaaaggcacttcactccttttcagatgaggttgcggtaagttaatggcgacactgtcctttagtccagctgtcaataactgcatactgtgaacggtcaaagtttacatgttggtaagaagtctggggatgtgcaccattgttctcttgctttatttttccattggaaagcaattgctttgagcaccaccaacaacaaaaaaaagattatagaaaattataccttttaaaggcaatctctgcatcttgtttaatgcaagaacacagtctgtaaaatgtagtgtgacttgcacagcaattattcactgtgttagatctaatttcagaatgtttcaattgcccattattttagcacattttttaaaaatgtaatcaacagcagtgttgaaactgaagttctcttgaaggctgatgtgttggtgcctactgattgtacaaagctgtatactgtctcttgagtattagtgcttagaggacattgagatcaatctgctttgttaattgaagccttattagttctacatgagtgtgcagtgtgctcaatacagtgaatcatccaaataaccaaaacttactacttttaagaatcaaagtttttccctatatttaggatttaatgattccctgccttcttaacagtgcattcgaatgataactgaaccttactttatggttctaggccatctatttgcattgctgcattgattattctgttgagttaataagacataaggaactgattgtccctatattaaataactccaaaatgttaaaatactttagtctcttttgataatattctatctactttctctctagtcctctatgatttttcagttcttccaatgcacccttgatgctattaacatgcttattttaaacacaagttcctgggtgaaaatgttaagataactgccctcctcatagagtccactcctcgtatcaaggcagattcatgcagggatgaaaagtatgcactctgtttaattccagcactgtttcctagtagctgttgatcttgggcaagttacttaagctttcaatttctctctcttaacctcatctataaaatgggcataatagaactcacctactagaattgttgtgaggcccaagtgcctagaatagagcctcatgtatagaaagtgctaaatagctacattagctttgtttgttgtagatacactaatggataaggaccttgttgaaactgtcttttagttcagagaacttctgattttgaccagccatattccagctttcaggacttactagttgcctagatgttagaagttggaacatttgctattcagattatcctatctcccacaattttttgattacctcaacatttcttgggagttacagggatgtaaaatgaataaacttggccttctttctacctatgtgatttaatgggtagttatcctaaggcagagtgaaagagttatttgcaaatctgcctgagtgcacacactattgactgttgtgaataactaccataaaccacagcattgagtgctttccctacttacaccaactcatttgctactcaacagcccatgagtagcagtagaagctaaagagaacacgtataacctcctccaggtctttagcgaatcagtgacaatgcagaatctaaaacctaggtctttccaaaacttcagaatgaactagattcttgcctcccctcaagttaaaagaatatgcaactgtttgtacagcacctttcactgaagttctagttgaaaggaattgtttattaccagtgaatacatttcatagttgaatctctgtggttgtttggttccataaattcttgtttctttttcaagatttgagaatgcaaaatgctgcaattcagtcttcatccttggaaatatctgatggaaagatatgggcagcatcaatgtcttcaaattctgacttgtcccaaagcctttcaacctcacttctcttacccatctttgataggttcaagggctatgtctgtccacaatggaagtcacagccacatttggctctttagctttcaattaattaaaattaaatacatctaagaattcattcctttgttgaattagtcacacatcaagtgcttaatagccacttgtagctagtggtaaccacagtaactagtgatatggaacacttccatcatggcagacagttgtgttggacagcgttctaggagaatcatcacagagatagttgccatatacacactctttctcactagccagggcttgggacccggtttcttatagatgggctggaagtcttcctcttgcctttctgaatgaagctgtactgacccagtcaggcctgggcagcagtcgcttctttagatctccatgggttccaccctgcgtcttgcttagctttcaccctagccttagccacatgggtaacatgaaatggaaaagaatcgtgaatcaaacacacagaagctatccaagaaaaccacaggagtggagatgccaaagagagaagaaatggaaagagatgacttcagaagattctaggttctttaatgcctcccattaaagttgtctcctacctcatgggtcttggtgactctaatttgtcttttctctctctctcttttgtggtttttgtttgtttgttttttatttggagaaacgaagtcttgcttcattgtccaggctggtttcaaactctgggcttcaagagatcctcctgcctcaacctcctaaagtgctgggattacaggcatgagttaccttgcattgtcaggctttgaaattgtctgagtaggctgacatcagcaatgtttaaagagaatgaggtaaaaggaatagaaaatgtttgagtatgttggaaatagaaatggttttatttcataatctgttgcagttttatatttatgtacatttgtgctggttgctacatgaaatatagcgcttttattgtaggttgtggtcaaagtttgaaaaatcctgggttagaattgtagttaacacaataaacagaattctttttctaattttccaacatctctttccataacagtattatgcttgttttgtcatatgttttatgtcaccgttttatgtgtatcagaaccatgaaaaacaagtgcttcatttgggcatgtgtcattgggaatagggaaccctctataggaagcagatgatggtttcagattttaaatatgagtcacaagtttggtagaagaatcacacacaaaacagttttattgtgaaatttgcagatttgggaatagggaatccttgctagttagttttatggggaaaattattgtacatggactcatgataatctgtgttaggaggtgcagagaatataaatacttgtaaaagaagaaaaaatggagaaaaaggtgcacatggctggacaatgtagatcagaggtctttatttatttgagttcatggggcgcttacttgtctgacactggcatcagggctaaggaaacaaaggtgaatatgactggctccctgccctcaaaatctgacttcttaattccggagagaggcaagtccagtaaacaaacagctacaacgcagcatgaatctaagacagctgagcacagagggcactcagatgtgtggatgcatctgactcagccagcagagggatattttcatccttggaaccttgccttgtccaagccaggatcttctgcccccgcatcacccttgtcttccctagcaagtgtgcagatctctgccttgataacgcgtgttcttttgtacgtttgctgagatccatgtacaactattctcagggtttttaagcagctataaaatgaggtttttacaattcagtttgaatcttctcatacaataatcatgttcatgattcagcacaggtttttacatgttgcattcctactcaagggcagggttttttttcccctccttttttccactgaaagaatgccaacaggaataaattgagtgggatgagccttcatggttaccttttttcttcacttgggtatttatagtaagatgaaatgtgcagaagctgttttcctttcatataaaccaaagatacaaggaatttactaagtgtctgggcagtcgtttggtctcatgagaagagcatggaagctgcaggggcctgggcgagctctgggaggctgctcctcaaagtgggaccacagtgccagcagccgcgctcttagtgagggcttgacttaggggtaccatgaggaactttctcatgcaagtgaagtggtgactcttgttcatcgcttccgagttttcttgtgggagcacttgcaaacaaaccctttccttttaagttcttacctcctattgaccattttgttccaacttaaaaaacttaaaaattatacctttagtttgaccatgagccgtctctttatgagcattagagtattggaaattgtgatgttcagcaaaatctagaacacatggctgctttataaaaatatgagattcatggccaggcatggtgactcacacctgtaattctagcactttgggaggccaaggaagcaggatcactggagccctggagtctgagacctgcctggacaatataacaagaccccatctctaaaaatatgaaaaaattagtggcttgtacctgtagtcccagctacttgggaggccgaggcaggaagattgcttgagtccaggagttcgaggttacagtgagctatgatagcaccactgcactccaccctgggtgacagttagattctgtctctaaaaacaataataatcagaaaaatatgagaatcagtcatccaatttaatacttatctgtagccttgaggtcacatggcatgcataggcttcccacttcctgctgaaagtactgtcttaaaattatcagagtgggagcagcctccagatcaggtgggagctgtgacctctcagactgtgctaaatagctgtgtttgttgtactgcttttgtaagtcaaccaagccacaggttgtgcattgtgagtggaccgtgttgcatctgcctcctgcctctgaatacagtggtcccagcaatagatgctcaattctcagagcgtctgcatgaccccccatggtcagtactgcttcactgtgctcctttcattgatcctgttgttgctgccacgagagcaaaataaaattaatataaatatatatgctacacacacacacacacacacacacacacacacacacacatttttagagggcttgtggtttctgaagatgatgaaagaaaaaaaagctgtgaaaagcaaaaatgcccaaaagttcatcttctgccctgacccatcacccttcttcagaggtacccagtacctccaattcccaagtctttctggggttctgctgaaccaacacgtagccgtttatcccttcatgtaagcttagggttctacattttccaatatgctaactaagccccatccattagccttacagctcctaaaatgttatctttcatttgctgtagtctcctctattgttattcttgttatctgagtgatttgaagactttttatgtctttgctggcattttggtggggttttagaagagcgtcgaggctgcatagatgtgttcgatctgtcttatttatttggacatttcagcagcctcttttaaaagaataatcagtccccagtccagaaacccctggaaccacttggtacttcttaaacctgccttcccttcacataggctgaccgctcaacctgacttcaattcctcactccaaacccagcccaaatttagggaacctatggaaatgcatctggcctggtctgtaccatttccttaagaaatgatcactccctcctcttattttccccaaaatcatacactaactttatcacttaatgtcttgtctattattgttacctgaccattgagtataggaaccattgtcacacctctgtattctcaacaatttacataatgcctggcatttagtaggtgcttagtaaataacaatggtaattgtcactacaaattacaaaaatatgtttatagtagttctaagtctcaatcagtcttcccaaattaaccgggaaagaaacatgctcaggcagaacccatgagtttcaacacctggaggtagttactacattggcagaatagtgttgcaggggaggggaagggatggatgcaaagaaataaatctctctgtctctctctcgaaacgtgagaggtggtatgtgaaagatgagggcactgtctggggagaaacaaaatcttccatgaatgcgctttagtcttctacagggcaagtatgacctagatattcagcaattggaattacttttaaactgctcacctgtctactgttgttccttgttgatgaggaaaatcaggtgatgcttatcttaaagataaggtgtttgtatcctcccttgctcaggatccaagcaggcttcattccaggcatcattaagtgagtctgttgccaggaaagctgcagtgtgggcgttcaccatgactgctaaatttgcagcatttcttttcattcaaactcatggatggaggagagggtctcacttgtatttgcccaacacgtattattagtagtattattgttttacatttctgcagtttttttcatggaagcctcacattctactttccagtctcacaggccatcctcaccacgatacacatgatcatttagtagcaaagtctgttcatcagaaaactctaattgctttatgtgtgagaacattaaactgcaataaatttatggatgcagctgctccattactggagaacaagttttatctcctaataaattgatgtttctttttagtgtcaactaaaaccaaaatttacacccaaggaattgaaccttaacattaaataattacttcaatgccgctagtggtaagaaagggtactcacttcccaattctaaaaggccggagtgagggaaatggttttttcctctgttaattgtttcttgaaagcataattgcacaagggctttaattgaaataagcataggagctatgcccttttaaagaagatactgtaaatagtgtcatcatttggtatgagttacaccataaggggaaacactaaaagccttatttatgttgaagggtaagggggaaaaaagaggttcactttggtgttttgtctgcagttccatttaagataatggaatagatgcttaaaattctctggactttgatgaatatttaattcatcttttctacaagacgtttgaattaaactgactactgataaaagatacagtgtggacaatggagttatgtaaatttggcttgctctgaggggatctgaatttaaatggccaaaggatggtttctttttgttgtttatgataattcaaatgtactaatcttgtaatactgtacattaaggacttcaattgtctggtcccatgtgaaataagaaatagtatcaggtttactttatgttcatattatggactaaaagtttattatacgtgtgtgtgtctctgcactcatgaatatgtatgtgtgtgtgtgagggagagctctcccctaattcaaatatgacacagattaaaatggctcctggacaggcgcagtatctcacacctgtaattccagcactttaagaagccaagttgggaggatcacttgcggcctctcaggaggctgaggtgggaggattgcctgatcccaggagtttaaggctgcagtgagctttgattgcatccgtgtatactcagtgtacttcagccagggtgatagaggaaaacactgtttcaaaaaaaaagttttcccccaatttctgtgaatcaggaagactttagcagttgaatgttagaatattagccaagctgaagtagccctgggcagggacctatacttctgcattgctccaagtcagccatctgcctagtttattagctttgtcatgtcactggatctctctgggcctcagtttcctcatcagtaaagcgaagaggttggtcctgataatcacaaggctaccttatcattggaatgctctttaattctgtcactcatcccacaacatataattaacacctacatcttacttttctctgcctttaaccttccattcagtgctatgtacggccagttgtctgcatgggaaaacaggaaagcaaacaatccaagtacagactggatactgttctatgccagttctatcaattatctgggaaatgattgaataatccttttgaaaaaaacataaagtattagatgccatgatagagatcagcacacattgaagtacttaatgatgcaatctgtgacctggctctagcattttggaatacagttctgtgccatataaccacatgtcagtcaatgacagactgcacatatcacagtggttccataagattataataccacatttgtactgtaccttttctatatgtagatatatttagatacacaaataccattatgttccaattgcctgcagtattcagtgcactcacatgctgtacaggtttgctgcctaggagcaataggctacaccatacagcctagctgggtagtagactacatcatctatgttcatataagtatactcttatcatattcacatgatgatattgcctaacaacccatttctcaggatgtagctgcattgttaaacaatgcaagactgtagttctaaggttgatggaatttttttttaagtctctgctagctacagggaaatttttccaaagtaaaagaaagatcttgtgaaaaatcacataagaagcacattgggtctctggggtaaaattaaagggttcaaccagaagacatccttcttcctcttcaagaactcggatctaagacctctgcagagccatttttggtcttttaagaaaaggcaaaagtattataatatttagttattagcatgttcatttgccaaagttctaaaaattccttagtactatatatgtatattttatagaatcttgaggtctcttgaataagtaacagaatatatttaaagccgtcttgtggtacttgcaatctacttttactattaaagttactataaagatttagagatattatatctttgcctgtgtgatccattgttgccatatcatggagccaactccttggtcagaaacataacctccaattataacattgctcctatgggaaaatctgatccactttatggtgtggtttctaagaacacattgtggtgaaaaggagaggatgcctgtatttttttaaattgaagcttttcaaccctttataacatcagttatgacttggcgagatgtgaacaatgtgtcgtttatggattgaatttgagtgtggtctcacgaccttttccctaatgcatacaaaatggataaaaaatgtatacctcaaactgaagctttaattggaaaatttggagctgtacatatatacactcatgtttttagaataaggattttattacaactgttgtaaaataaaatttaaaaaaaaacctctcttctctgcagtgccaaacatcttgattttccaaacatcgactaaagccacagttattgataacaaatcctgacttttctctcaaaaattcaaaaagtttactgtcctttggctccttactgtcattaatcagactacgtttcttggtgaaatctttaattacatctttaacttgataattacttctaaatcctgcacagaatcatagtcctaaattataagggcaaaaaaaaaaaaaatgaagcttacaaagtttttgtttgttcgtttggaaagtattggtgtatattgaagatgtccaatcagctttctttgaaaaatctctttcacaatactattcactgggccttagaaactgcattaactaaatagttcatctgcaaagaaatcctgaggatatggtgaacttggtcaagagaaggatacaatttctttccctcttttcatgagaaatctagccagactatagaagggacaaaacatgtatgtgacagcaggtattcatctcacattgaggaagtaggaaggttagtcttagagatggacttggagaggataattatgataatactttagagctgtcatattttatgaatttaaacaaatttttaatttactttagagttttttgtaactagtgaaaccttagcactcatagaagtaattggattggcagcccctgagaagactgttcaccagcaaagcagattcacctgccatagcccaggtattccccaagcctgaggcccagctggagggagcagcgagattcaggtctcccacctgctcccagcaatgaatcttttgcggcagagtccggcacgtcacctcacatactgctctcaaacccagcacattgtaacatcccacgagatcccgacttcatgagcaagccaggcttcttttttgcttctctcttgctgtgactcaactacaatgaaaagtaaaaatcgttattttctaagaatgttgttggttgggtttatcatatatctccagccctcttctccatattctatcactgtgatttcatccacttccatgacttacattacacttgtgtatatgtcgatgactgccaaagctatatcttcagtttcacttctctcctgagctgcaggcatgggtttctaatgacccactctatgtctctccctagatgtccttattcttcatcgtattgagtgtttatgaagtgcctcttctgtggtcagcactggattagatgtttacttgtatctcatctcatattattcacatatacttgaagccaatatgatgatttctataaggggtatcagaagaaattattcaaaatatgacaagaaactctgtgctttatatttcatacttaacaaattggtcattgtgaccctctatgagttaagaccaccttatttccaaaaaattatttgaagcagcttcttaaaatagctgttcaaatgaagtttacaaggacacaaaaatgatagaaagaacattacaaaattgatatgactacctaattggaatgacagagtaattatagttgtacatcagtttaatctcagagtttcctggcagccaaggcaaaaagaacaacatcaaatccttaatctacgatcagaggaaatatgttagttcatgtggagaatactttcactagtgctgaattctaggagtatttttaatatacatacttgtaatagataaattgtgaaacagaataagcattttcaaacaaagacttgtttgagattcatgaattttcttatgctcaattctttgataaacgtgagatcatctgtagcaacaccttctctggcattaaattgtgctgtataatttcactgtgaagtctatatacattatagaagaaaaattatataacaaatcaaataacattttttaatatagcttgcaaagacacagaaatattcccattatgaccatttgtcatattggcttttggtcaaatctgaagatatatcattacattgtaaagatattttcctgggatttaagttaatagaatttagaagtatgcagctttagaggtcaatattcttggtcttattacaaatagtaacatgttcatagagaattttgtgaatacaagaagaaagaggagactaccaggaaagggggaagtctgtttcaaacctctctcaggataatcactagatgatttctacctaaaactgcaaaatcagtttaagattcatgtttttatcctattatttatttaaaaatactcaaatggtcatcaattatttttattgctgtttctggtagtgctaattttaatacataccatcaccatttttaatcaattataagattcagcttttcagaatttaaaatccctgatatcaagatacttattatacaatggcattttaattgacagcattttctgtcttcttagacatttataaaatgtgtcatgatcaacggtttcttaaattcaacaattaaaagggttatagttgtttacttcgtaaatacttcctacagttctgcaacacaaaattcagaccatattcattaaaaacaaacaaaaaaaaacttgattctggcaatagagggatagaggattaattctttgaagtttttgacatataaaagggattgtggggtctccttttattggaaagacagagaattaacaccttaactgaatccatattgtaataaaccctaggacttggaaacaatgttgcaaatattaagtatcgtataaatttatctctatggaaaacatcttcaacttcattaaatgttctgtatgatgccacttatctatttcatgcacccccataccttctccaaaagttctctagacaatgttgcactgagaccacagagatggcatttttaatgtcaaaacaaaataacgtagcagaaacctatagaaacaatgttgtggtgacaaaatgaaatgtcagtggaggtctgttgtaacataatgtcaaaacaaaatgtcagccaaaatccatggagacactattatgatatcaaaatgaaacaatgtcagcgccagtctgtagagacattacaatatgagaaaagacaaaacaaaacggtatctgtggaggcctgtgacttctgaggcttaatgtagcttcatgtcaggtggttggcttgtgcaaacgtggctaatatttcagtatgtattttctaaggcttttcttttccagctcaagaaaaggaatcccaaagcggttctttagtataagtggctgggttaggcaattgctgatatttatatctaaatctatgcctgtgtccgtatgtatgtcagtgtgtttgtcagtatctctctctattcattctgggcttctgatgcttccaaacacatcattagtcccatttggtcttggcttagtttccctacacaccagtacttggacatcggttggaagtataaaatacaggcaaggcagtgttccaatctgcttgggaagggtcatgctgagttttagcagatgttttgctccattcttttctcctctgtcctcaggtagaagctggcactgcccccttccttactgagccttgaggcaccaggtggttttgaaatgtgcccctgaattcctgtgacctttggccctagagctcatgatctggcagcaccttggctgggtaatactagtactctgttttcccagccctttcataggagctgaaagatttttttaaaaaattatatatataaagagaaaaacaaatattttaaaaatctataatcatattaagttgggatttttttccaaaacaaagttagtaaagtatcaaattaaagtagatatcattgtgagacaaattttattatgtagaggcaaatttagacattgtaaagggaaaattttactatatatataaacttataaagatcaaaaggtttttatccacatattaagcaatttgagtctggaattaaatattgatttgtttttgttttagaaatttgaaaatccctgaaattgagagaaaaaaagtcaaactagagaaaaaaagaaaaaactctgccacaatagtaaagatatatttttctcattttaatcagctgcagtataattttaaaatcatgtattaagcaacaatacaataaagtctcaattagctagaaaccaagcaaacccacagttagccaatatgtttccaaattacacttttagaaacaagaggtagatacctataaaagtgctgttatcggggtgaggtggggggtctgtcagaaaaatagtgagaaaccaaaagaactcaatttcgtcctttttttctacaaagtactcaacagtgagtcatgaaaatctcaaaagttttttttttttaagttaaatatccattattccttcttttcaagatggatgagacctttattactttctagaaggattttcaaacacaaggattgaaacaaaaaaggctttcagtaaacctttggctaatcagcttaccactcggttcttctaagactgtgattttcagaaactttaatcaggttcagtttacttgtatcgatttgcacgccttagccacaaaactacaatatctactggtggggatgtgctggagcctgaaattgtattcttgaggcatgcgcttccatagtggtgataggagcatgcagtgggaaaagtgggaaacgttctttgtcaccagcatcagtgggatactcctgagagatcagaataggagctggtcactctttagcaggagaacgaagagtgaagaccagcaaagattgaaacagaggattaaaaattgtatgtcacagtcaccatattgaccagcagaagtaaatgtgggcaaaaactaaagccaaactgtgattttcatcacatgtcaaagaaaggaaaactagtttgagtatagcaccaggtcatgtgcttgggagaaaaagtgtggaggactcggttaaatctttaaaacagtatttgtatttggagctttgtagattacaaactcaatgttttaaaaatgtactccctaaattaaccataaatattgtaaaaaagtaatacagaaattattcctaaagtgtgttaggaagtggtggacataattctgtaattataaccaatagctgttaccattttggaacatttacatccatgtctttcgtctacttaaaaaaatatataagcatccatataccagttttattcttgaaaagacatttaagctatttgaaaataattgagaattaagaataacagaaattagaaagtctaacattagagagtaaagctatttcttcctcttttccttttggaaatcactccaaaacaagaaacagaatgagatatagaaatagtaactctatttttgtgaaaatggacatagttaatatagaatgacagaatcacactggaatgtcaagaatcaagcttatgcaccccgcaccaaagattgctagattctcttcggaagacatggaattgccctggaaaaggagtccacatacactgtcatgagaattcccaaccaaaaaagtgacactctgcccagccttcctgtccaccatttcataaacccccctgaagcacacagtgactaatctgctttttagtgcttcactcttaaatataaaagggcagaaaaacatgtgaaacatttcagaaaagccataattgtggaagacagagtccaaaacaaacaacgtttgtttgttttctttaagaacttggaggaaacataaaattaagagaagagaaaaatattaaggaattataaacagtaattctgtgaaatagaaatgatgttaaaaccatcaaagatgaacaggaggctattgaaaggattattgagtaaatgggaaagaactcttagaaaataataaatacaatatcagtattaagaaacacaatagaaggcttgatagatgaggttgagaagtttcccataaaggaaaacatgagctataggacaaagagcagtatagtgagaaagaaaggaagtgaaaagttcattctgggaggtccaatatttaaagaaaacaatttctagaaagagagaacagagataataaaggatagattattagagaaataacacaagaatcttttccagaactggagaacttaagattccagattaaagaatcacctagtgctgagcaaaatcaatttttcaaaaaggacagcattgtgaagttttggaataccagaaagagaagatcctgtaaaaaaaaaaaaaaaaaaaatatatatatatatatatatatatatatatatacacacacacacacaatgaagagttgagaatcagaatataatcagatttcttcacatcagtcttgtaagctagaagataatagagcaacacattcaaatattgaagggtaatgttttgttacctgaaattccatacctagccaaactgtcagtgagtggtaatgatagaatacatacatttaaagcatgcaaacgcaaaatattttagttctaatacccttttaggcagccaccgaatgtgtgctttaacaagtcccaggacttctgctgtgcagaaaaccaggaagcaggcagcctagattggcgtatgtggtgggagcttttgaggttagagggctccaggaaaaaaattgggcttaataagccatgatagacttgttctcctggaaatctgaaaaatcagattgtaaaatcattttcatataaattttgctataattatattgggaagatgtggaagatgggaatttggagtcagaatttggatttgagtgtaagagagctaatgcttcatctacctttgtaggaagtcaacaggtgtgtttaacagtaataaatcaggagatagtgatataaatatattacccagaaatgtctaaataccagaggaatttggttagacatggcttattattaaattcctagcttttgctttgtgtaatagattcatactggcaacttacatttaataatattgagcatggcactttcatcataactaaatgaaagtaagcaatgaaaccatcactagcaagagtgtatcacaaaccaggaattacaatggattcattctgagtatctcaggttgagttaaaaagaaatgtcatagaaaacgactgaaagctttaaaagtcttggggttgggtggtcagagagacaagatgtgatgaagcagaagtttcatttaagaagtttcttttaatgattcttttaaggcttttagcattttaaaatataaactatgcacatgtagtattactttgaaaaaaaaatgtaattgacaaaagaatgttgcaagccctttcacaatctatcagtaactccaaaatctgtcaataactccagttttcaaaatctatcaataactccaaaccaatatggtcacactgtttttgttttcctaatataataatttaactaaatctgaaatgagaagttaaattaattaacatttctatgtcatttattccctctctccagataaataatggccaagttgtaaatagaaaaaaaagctcagaaaattattaatgaataattatgaagttcatcaagagcataaatagaagtaaaaaaatcaatcaggaagaatattttaatgatctttaaaatgttttaaaaacagtaatacaaactcttcattaatggtttctttttagaaaactggttattagatgtatgtttcactacttttattctaattctcaaagaagtttcagagttagcctcttatgaaacttacaggtgatatatctcttgttacattatttaatattctgagtcatttcaagaaagtctgtagaatttagccatgatttagaattatgacatgatttggaattaagtactgcattgcactggaattttttcttttaaaaaaacatagcttagtttcgtatagtgttttgcaattatgctgtcattaaagacagaaagcaaaaacaaagaaaatgttcgccttgaattctttgtaatcatttcatgattaaagaattaaaataatggttctataattagtttctatgcctgaatgataaaacctttctaatatgaagaagaacatgataatcattttattgtgtcatcaaaacccatcaggttttgtaatttaatttccattgcctttttatttcagttttttgttgttgttgttgttgttttgagacagagtcttgctctgttgccaggctggggtgcggtggcacgatctcaggtcactgcaacctccacctcctgggttcaagcgattcagcttcccaagtagctggaactacaggcatgcaccaccacacccagctaatttgtatatttttagtagagacagggtttcaccatgttggccaggatggtcttgatctcttgacctcgtgatccacctgccttgacctcccaaagtgctgggattacaggcataagccaccgcccccagcctttatttcaaatttttataatgtattcctgtttttcactctttttagtttgtcaagatttttcacctgtaacattgaatttcatttgctctttaatcagacacctaaatgtatattttagtttgaggcacagacttcaactgtgggtcacaactggctgaactttgtatccccagtggttttattgaatgaataatataatccacaaactttcttcagttctctaacctattagaatcccttacacgtccttgccatttgttagagaattcaagaaaatcacactatgaaaagtaagtgcactttgggcattaaccattataactgctttcttgcattgtgccaagaaaaatgatgcctgcctgccttcctgccttcctgccttccttccttccttccttcgtcctttcttccttccatccgtctttccttctttcctccctccctccctgccccccgcttcctttcctttcccttgtttcttttctttgtttctttctttttctttgacagagtctcggtctttcacccaggctagagtgcagtggtgcaatcatggttcactgcagcctcaaactcctgggctcaagcaattctcctgcttcagccttccaagtagctgggcctacacgcaccaccacacccagctaatttttttttttttagagatggggtcttgcgatgttgcccaggcttgtctcaaactactagctaaagcgatgctcccatcttggccacccaaagtgttgggattacagggataagccccggcacccagccaacattttattttctaaagtgcatttaaattcataggtataccccgaaaacattttctctcatcttttacttgcttaaatctatgttaagattgcctgctagggagtcaagagacttgggaggcccagacctcagcccctgccctttgtccacgtacctcacagggtcttgaggaagtccaccatctttgaggtttaaagctcttaacacacattctcacaatagtcactcttattcgaatatggtttcttaaaccaaaaccttgataattagtttgacaatgataatttttaaaaacttgctaagcagtgttactttagtgctgagttttcagtagatgccccattggaggtatggctgtgatagattcagctgtccttttgagtagagaccagcttggatcatttttgtgacactaggtaagatcagctacctagggctttcttgtgtgtatttattgctgggtcctgaaattatgtatgtctttgcgcttgcatgttctctgttgctggaggacttcccctcaaaaagtaaaactaaatttttcttactcctgcctgagaccaatgacaagctaataaggaagagtgatgaaagtaataaaatagggcgaggggtacattcctgaggttttgttgcttataaaatgatagtcctgttacccagagaccacagagggacttggagtaagatctagtcctgaggctttccgatggagagatgacctccctgtgatccataaagcatctggagaactggagctatcacatcagaagcaaatgcaggattaacagctttggagaccacctttttaacccagagagcatagctgtatgtttttaatttgttatgatttattacactgaaattggtgtgaaatggacaacaaatcatgggtgtcagaatctggaaatgaattttatcagctgagcaaagtgagtacctttgggatttgcatgagtttctcataattctttttatattacagatgatgagtaaaactgtgaaaataaactgaaaatgacatgatatttcctaagtagttaatttcacatgtatacatagacacatataaatatagccacttagcctcagtttagactttctctataattcagggtgatttgtacataaccacagaaatatttgtctaaaaacctcaaagtcagtatcaagaccatttgtgcaatatcataaatgtctgggattatcatagaaaaatgcaaagactataacaagatatttaccaactataatttttttcaatgttcaaatttggaaaagagagtttagacttacataccagtatacaagtggtaagattaaagaaggatccatcccaaaatttcagatgttataaataccctgaagcatcacaaaaaaagcggcccttgttagaaactaactttgcatgcataattaatgtgggcaccacattcctacttcacaaccagaagagaaattgaattcaggtgtttggtgaacatatgggggatttactgtgaatttatgacctgtgatttgagtgtaaaaccccaagatacttgctgataaaacttaatgaagcttgcgcagaggagctatttttatttgtagtttgataattgatacatttcttggtttaaccctcccacccttcctccattcctcataagtcttccagcctgagagatagagccatagtgaatagccacagtctttttagccagcttggcctcatgcttaactaatttgaaagttcacagtttgcttttctgtgacattttagtctgttctttcccttctctcttaatttagcgattaatactttttcacaaactgtacaggtgatacaggtgacaggaggcacaccgtgtgctttgaacaggtaccgtgggagaacgtgcaaacgctttcacagggggtgacatcaatttactatttcttaagaaagcaaagataaaggcataatactgctcatcattaaaatttagacaaatccattgccatttaaaggttttttctccaagaagaaacacttcaaggggcaggaacctgccacacatatcctgaccatgtctctctgcttcaatgtttttatctaggattttatcaagaatgctcctgatttgagagccaggagaaaaatattctaaaaaaaaaacaacgaaaaacaaaagcaaatgacaagtgttccattttaacacacggggtgtaatgggtttaatgagaaacctgtgtttgctcactaatttacagcaattaagaactcagttctgacatctgtagattagaactatttatctagagatcaggcatattttatggaattgctaatcagtatagaaaaatatctaagtgggaagcaggttgtttacctgcctctctgaatggtgtcaatatctggtagttctgtatcataggatccctttttagttcagtgacatttatccccccaatgctttagtcatcccagttcaagaacttgtttgtatccactttgtcatgctgacagtctgtctgttttgaaaggattacaactctgtacatccatggatgacatcacagtaagacattgcttaatgatctgagacgctggtggtcactgctggctgcctgttactacggcttcatgacaggtctgccctacatctgtttctcccggagtcactttttgcctactccagtcctggtgtctgctttaaatgacatccatgaaatagctgaagtttggacttaaccattggtacaagtaaaataacccagattatttttttcccaggatacaagaagaattagtaattgggcaaggaaggaaaaagtgctctcatttttctccagtgaagatgaaacaatgttcttggaaagtgggttttttactaatgggctggatcttgagttcttccatttgtggaactatgaaggaagttagtaaagagataaatttttcttaaatgaggggactgaagtgcaagaacctcctgtgaagattgagttgttacccaaggacatcatcaaggcttggaaaagtcagggttgaagaaaataggatctttgagtataagtgaattgagtcttagaagctttaacctactatcttctcctttctatgtgtgctgagatgcagaccatgatgatgtttcttaagttgtaggactttgaatgctggctggtgaaagagaaaagattttcttaagcagagagcttggcagctagcagaactatagaatttttttctgccctgtgatgtgtacatgggaaaactgtctgagtgatagaaatgtatcaataggaaaaagcttttttcttttttttttttggagtgtggtattgcattatttccaggattgttgatacaatttggaaattaactttttgaatttttttttaattgggaaaagaataatgttcctttttcatctgcagtaattggatgccaagtgcaggtgtgaaattcactagcatttggaatagaattttgtacataggccaaaaagtaaattgctagggctgagaagtagatagcaaaaagaaaatggccaaatgatataagctgatatggttaacaaaaaatctttaccatgtacctgtgcttttgtaagtagtggatttgaaggggcatcttttaagtcctgagctcttggcaaactaagtaaatcaaatgttaacagggattacctttttgtgagttgtgtgtttgacccagatcccagcaggtcatcaatctctgccagaaagagaaaccagtaatgagcccttgagttcagttttaccgaatcacctggttggcaggtatattttcaccaggctccaggaaagcactcacattcttgccttggtctctcaggaggctgactttcagagatcacagagccctagtgaggtgttttgggtgcagtagcggggaggtcgacaaaaggtatcaccctaagcaattgaatagatttccatgggacattcttgactatagactggtattcactggaaagcacatttgattggtttcatgtattaagatctggcagtgagcatttttcagttacatcttctgcaatagtatttactttgtgcaatttttcccagagaccagaactttgcagtgactaattctatgaatgatcatggtaaaactcgctcgtaaaatgtgatgcctgtctttgattccactcttctaacaacatgcttttgcaacaagcaccatttgtttggttccacttgtgggcagggcctatgtgtttctaggacattagggccaccttaaatccatccatactttatttccttgaatttaacaagaatgtacagcccccataatgctgtttaaagtgatggggtggtagtattggtgtgggggcggtctgaggagggaggtctagaacgtttattgctgcagtgctgtcacatagcaaattgcctaacctagtggcctctaataacaagcattgattttttgctcagacatctacagagaggctaggggttggctgatctaggccaggctccactgggcttgacttataagctgcaggttggattcatattcactccatgtgtctcttagactgtgggcatgttcttgttatggtagaagtcaggagcacaaagaatacacccagcatacaatcagtttcaaactccttttgtgtcacatccacaaacatcctgttggccaaaacaagtcacatggccaaggccaacaacaatggagtgttcgttttcttttgctacaaaacaaagtaacacaaactttgcagcttaaaacaacacatattgattatatcaccgtgtctgtgggcctggagttccagcatgactgagctggatcctctgctcagggtctccctcggggtgcaatcaaggagtcagccagactgggttctcacacagaggcttctactagggaaatatcagcttccctgcttccgtcattgttgacagcattgtgttccatgcagctgtgggattcttggctccttgcgacttcagtaccagcaaggagagagacagaggcataaagagggacaccacgattgtaaccacaaacactgcgtgatccctgctgcatttctcattggttagaagcaagtgcacagcaaaccaccatgacacacgtttagctaggtaacaaacctgcacatcctgcacatgtatcctggcacttaaaatcaaattaaatcttaaaaaaagcaagtgtgggttctgtccacattcaagggtagaggagtgcataaaggtgtgaaccccagaaggtgtggacattagggccaccttaaatccatccatcacaaatatttgctgatcaatttgttctgccacagggaagtgacatacaagatatgtacatgttgaatggctatgatgaaggcacaaacctaagagagaaaagcccatacacatgccgattctggtaaactctgtaagtcagtatttgggtcaggggacaattacaggtgaactgaaaggaagagatgaacatgggctggagtagtgaggaaaggctgcaaggaagtggattgatgtcttagacttactggtagaatttggaaagatggaagggaaagaagagggtattaaagaaagaaaaacctgagcgactgtattttcctctcttctttggcagcttttcttctcctgtaccagagtttataatcatctctgccttctgaacaatgtggagagcctgccacaattcatttcctcctcctgtctaccttctctcttccttttctcccccctgctatgggaagcatagtgtataccgagaccaccttactttaaaaaaagagtggttacttctcctttccattgaattctggatcttaaaactactctcttccaggtttccagattccttttgcataattaaaaatgcaaatgttaaagcatttttaatccatgaagaattaatcagtcacatcacaaactcctctctttcagcatatactgctctgaatagataggtgagacttcaagcctgcaaggaaggatacccaggttcaggcttaggcagctgggaaggaggggacagtttaggagaaacaagactatctggacagtgcctggttatcagttttaacatattttgggggactgttactagagcaccaccagccttattattttggtgcaatgaaagtaaatagcctggagaagcgacagataaaataggcagcgtctgcagaatgtgaaccagtggttacaggctagccaacaatggacaaaattgttatttggcttacctagaatttcaaaagtaaagtaagtgaacattttaaatttgggagagaaagctgtctttctagcttctcttaaataagaagcaacaccaggccagcatcccttcatggcagtagtctactaactgcaggcattatcttcagagtgttgtccatatacctgcagtatgttctgaattcatatacgtgtaagttcttgggccctgcactagactgactcagaatttctcaaggcaagccttggcaatcagtatttttttaacaagctctttgaatggttctcatatacacagtgcatatagatgagaaccgctgttgtaaggtttctgttccctctcatcgtacctaaggaagtggttgagttggcttgcctgtggggcacaggtgcggggcaggcttcagtgattccctgcagataggctcattgctccttttagcctgaatgggtatccttagccacattcaggaagcacatagtagtatccaatttgaagatgtagaagccttgtacaccgcatggtctgcctctgacatcaaagactgcaatccccgtagtaattatggacgttccatataattcagggtcacatagttctgtgcacgctgggctaggaatctctgtagtgtgtgatcctaggtacccttccttaaacctgtcaggaaaaaacaacaaaaaccaaaacccagatcattactgaaccaaaagcaaaccctcttcatttagttagaacgtgaaattaagttccagttgggtacaaagccaatgtgttggtggaggctgagtgttggtattggactaaaactgtcttatagctgtctgtgtggatgttttatacagaaagtatctctctgttcctctcagcatccctgtgtagatcccactcatgtggactatctgtaaattaggatttctgactcttcattaagggttttattgtctcacccatctgatcaacttggatggtatttttattatatttctcacacaaaaaaatcatgaccaactttaagttggcagtgaacctaaatataagttgattaggatgtgtagggatgagtcactattgctaatgaatatttaaaatttcctttagctttcttggcagaagagctcaccaagaactttaaaagtccaaatttgaattattggctcattatagactggccagagagacagaactgagcaattgtaatggtttcatctctcaaagccagaatttcaccttcagactgccaattgttgttccccaagggggcttgacggtcttccagtctttggaaatcatcatccatcatgaaaaccattgcagcctgttttccaacttcagccattaagtggttttgccagtcttagacaagtcagccagctttctctagagtattgggagagaaagagcagaggaaaagggggtgaaaccaaaggtctgcctagctccccagatttggaaacaagggcaggagtgacttccagaacttatcttttgctgtgaaaaacaccagtgtcaccagaatttaacattgaggatactcggtcaactccctttgtcgggaaaacagactttcagtgaattgcaaatagtaggaggtcagtttttatcaatggtttcaacttcatgatcctaataattatgggcttaaaactctctgtgctgcatgaaaataacagaagaatacttctggttagatttgtaaaatactttgtcagtcaaacctcctataatcctcccataaaagctataaagtatgccaggaacaaaaaagcacaggtggaaaaatgacagtgagattcgggaatgcccactttcctgtctcttttgtcttatgaaggtaaccatcctcactcatgcctacaccattacggtttcacataaagaacagagtgctttttagattggacagtgcaacaatataggacactatatatttttaaagccagtaggaataacaacctgcctgtctcaaaagtgtggagggacattttgaagtgacgtggactgaagccttgtgtcgtcaagcagcccaatttacagacctgttcacctttaatgttccaggccaatcagttcagatttgtcagaagaaaagcaaagaaagacaagcttttattgactgagaaaataatcaaattgaatgtattgacagtatattctagaagctctagtgaaattgatacatgaaggtacaggggcccctcccaatatgttaaatgatgaaagactattccatatttttagaagatgttaacatgatgatcctgtacatgaacatgttcaattttagatgcttaaacctttgagattcttcaaaatatgtggaattatatgtagacttatgtccgtttgagaattttacgtactctactgtgacagaatttctctttccaagctacctctcacaaatcacatcacgcaggaggggtgcagccagcagaaccctggcacacactgagtaaccagggcaacatgcttttgtgaagagacctgatcttccgaatagctttgcagctttccattctgctagcagcttggagggtatatatgataagaagaagatgtggttcttgtcctcaagaagtctgacgttctgttgtggaggcagtagatgcctgatgggcttgaatagctttcctgatgaaatgagagagttccctgactcccctcacaggacatgcagcaggggtgtgtggcttgtctatttgactgctgtgtgtgcccaaaccccttaggggagggggagcatgcagatgtacaggtacgggagccggggttccagccccacggtagtgtctgggtgtgggtgcctgcagctcctgaagctccagtgggcatgttgcagtgctcttttagctctcctgtctgcagatggcttaagtgttaaccagcccagtgccccccttggtacccaggcccttgtctggcatccaggaaaaatcaggtcccacagggtcttgtaagatggtgaatgtggggattttattgggtgatggaggtggctctcagtgggatggatgggaagctggaaaggggatggggtgggaagatgatcttcccctggagtttggccatccagtggcccagtctcctctccagccatccccagccaaactcctcttgacattcagatgctccttctcgtctcccttctctgccgcaccattctgccactcttctgcccttctgtttgtctgttcatggagcctggggtttgcagtttatatgggtgcaggataggggggcgtggtgggccaaaaaggcaacttttgggtgcaaaaacaggaatgcctgttcccatttagggttatgggtttccagacttctgagggtgggacctttgctgaggaaccgccctctcctacccagtatttccctgtctcccgtccacgtcactgataggatgaaacttactgctttagtgaatggcatagaccaaaagtgctgtgagatttatgattgatttaattttggtcatcaatctctattactcttggcgaaaatactctttttaaaatttgtactttacaaatgaagagctttggagcctgatacatgttttacaaagtgatatgcatggcatagtgaaatgagggttggactgggagccagaaaatctggattttggtctcactttccccactggccagctgggagatccccaaatgaaccacttatcttctttaaatgtcagttactacatttgtaaacgtgtgcgtaggtgggtgggtgggtgggtgtgtgaaatactaccttctgcacctatcttataaggtatttctgagaataaaacaaaattcaatactatacaaaaagaaggccgtattgttattaactagatggttaaatgaaactaccacttgaacttatttttaaaatgtttttcatttttgctgtgagaattgcattttatttatagacctctgatgactcataaataggaacctcgtattatgaaaatattgctgtgcatttgtgcagctatatttcatggtgtcctctcacttgattattacaactcagatatttagagtaaaattattatctctacttcatatatttaaaaaacttcagcttagaaacattaagtacgttagtctaagaaggtacagaagctaggaccagaccctgttgtttctgacttttaatgcaatgtcctttccaaaaaaacttccctgccaacaccttgccagattacagaaaggaaatgaaacttttaaagaacagtgcaaaaaaaaaaagaatatctaaaaatattgtttaccctctcaaatatctgtctaaaatacctcaataagccttaatcctaaaaccaaaatgaaaacatattttaaatgcccacatattgttttaaaaattcactttctcttaaatggcgtcatttcacagcaagttgccatgttttgctagcaactgcagttcacagataatatttctgaagggtattcactgctgcctcatctctctttcagtaacagatcaactcctagcaatcatgatcggatacagcgtctgaggcaagaatttcagcaagcaaagcaagatgaagatgtagaagatcgtcggcggacctatagttttgagcaaccctgggtaagtaattggttcttcagcacggtgaatggtcctacaacttccctgcagcaaaggccactaagctatgacctcaatgctctatgaaacgagacaagatggagccaaattcctttgacctttaacatattgaccttttcctcatttccatctgggtttcatcattgctaatttcattttatatcttgttccaccatctgtccattgcctaataggtttcactagccttatgacaagacatagcaaaagtattctcactctcaactaagcattttttaaatttagtaaatatttttctgtagatacatattctcagaatcagagccaaaattaatttgttcagcacttctccattgtgcctgtaatgtacaaagtacagtgtttagtaattcttttttttaaagagatgaggtctcgctttgtcacacaggctggagtgcggtggtgcgatcatagcttactgcagccccaaactcctaggcttaggcaatcctcctacctcagccaccagagtagctggactataggcaagtgccaccacacctggctaattttttagttttttgtagagactgagtctcactatgttggccaggctggtctcaaattcctaggctcaagtgatcctcattcttcagtctcccaaagtgtcaggattacagttgtgaaccactgtgccaggtctagtaattcttgattctttaatcttttgcaccccccatgtgtgtttgttgaatccatcttattccagttcatccccctcatagccaccagagtgaaaaaacttcagatggctttctcagtgccagaactgtgttctgatcttgtgtctcaccctagagatgacagcacttctgagagtggaggggttgggacagattttttgagatgatggggagtttgaagaatttctttgggagacttgagagtgagtctgttagaggtgaataaataagctgcttaaggtaggaaactctagcatggggtattaggaagtccaggcagcatggtaatttgacctaaccggcaatgcttagaagactgggaatagaaggaataaatttgtggattaattctttagtgggggttggaagatagacatggcagaaagccaagggaggtgctggagtcctaccaaggatactggggaagcatcgtgtggtccaggtggggtggcaagtatagctcaaggaaggattagcctcacagcctagcagtgtgcaagagggctcaggatctaggggttctcaagcctaggaagttgtggtcaaaacagtgtattttttggactctaggatcttggaagtagaggcgatagttcagacgatgttgaggtctaaggcctgccatctttgcacgtgagttacagaagtagagcggagattagtgtccataaagttgacaagttcagttcagacaaagtgttgggaatatcatttactagatatttggaagagtaggacagaaggaagaatggtgttataaaaggctggaggccaggcatggtggctcataccatcaccccaacactttgggaggccaaggcaggagcattgctcgagcccaggagtttgagaccagcttgggcaacatagggagaccccatctctacaaaaaaaaaaaaaaaaaagtttttaattacccggatgtggtggcacatgcctgtggtcccagctactcaggaggctgagttgggaggattgtttgaacctgggaggttgggactgcagtgagaccctggctcaaaaaaaaaaaaaaaaaagaggcttgacattacaaaaaaaaaggaacatttgatttgaggaagggtaaactacccagctgagaggttggttatgttgaagggaaggggagattaaaggtagaaatgtaggaagagccttcaatgctagattgaaagtttgaagagaaatagtgctaggaaagaacactggcccagtagccaggtggcctggctcttccggcctcagttttcttatctctcaaccaagattagaataaatgattgcaggccaggcacaatggcttgtgcctgtaatcccagcactttgcgaggtcaaggtgggctaatcacttgaggccaggtgttcgagaccagcctggacaacatgatgaaaccccatctctactaaaaatacaaaaattatccagtcctggtggcacatgcctgtaatccaggctactcgggaggctgaggcagaagaatcacttgaacccgggaggcagaggttacagtgagccaagattgcaccactgccctccagcctggacgacagagcaagactctgaatcaaaaaaaagaaaagaaagaataaatgattggatgtcagttactaaacccttggatgaaatgaaagtttaagaagaagctaaatgtaaagcagatgcaagtagaacccctctagttgactacagaggctggatcctgttagctgctgctgaagatcagagcttctcaaagtgtggtccacagaacagcacctttagcatcacctagaaacttgttaggaatacatattcttggtccctgcattgaccctactagatgtaaacctttacgggtggggcccaggaatctggtttttaatgagccttccaactcattctgaaacaagttcaactttgagaatcactgttctaaagtctagacgatctctgaggtcctttttggtcctgaaacccaatactcacaatatattactctacataaagcaagaaacctataaatgctgctcattaagggatttagtgaccaaattagggtttgaggaagattaattttgtggagcaaaggcaaagaggaaaaaatgggagaagcagtactaccgttggcccttaaacaacatgggggttggaggaccatcccccttcctcctcacacacacaatcagaaatccccatgcaacttctgacttcccgaaaacttaactactgcactaatatcgcactgttgaacagaaaccttaccagtaacatagacagttgattaacacacactctgtacattttatgtattatatgctgtattcttacagtaatataaactagaaagaagatgttattaagaaaatcataaagaagagaacatacatttccttttctttaaatggaagtggatcatcataaagatcttctccattgtcttcagattgaataggcaggggaggaggagaaaggagtaagtcttgtctcagagtggcagaggtggaagaaactctgtgtatcagtggaccctcaaagttcaaactcatggtgttcaagggtcaactgtagtttgaagagctttaacttagttcaggtgaggaagatggggcaactggcaatgtgggatcagcatccaggtgtaaaagcacctcatgaaatcaattcttgcctaactttgggaggttataaaacaagttccctggaaaatctctaattgtcttctgcaacaatattactattaatggcatttttctaaggtatttagttcattttcctagatgatcaagtacattgagtcattcccatgtagcaacatgacagaattatgttaatctgcttatattgtttggcataattgactcaatccattcctactacatttcttgaaacaggattcttttgtgatgtgtgataaattcttaactatgtatatttacacaaagaggctgaaaagagtaatgagcatggtgtcaagctgaaggagaaaacagcagctgaatatggaaatagttaacacacatgcacacagttccaacctggcacagccccgcctgagcttatcattctccataccatgccatgaggagcagtgttcgccatttgactttgcctgggaatgtggattccaaaccagcatcttgacatttactctttaactaattatttaattcatcaaattcattgagttcttactatgtcccaggcattgtggttggtatgggagaacaaagatcgaaaagaaaaaatgccctcagaactctccagtagaactgataaaaaataaaggaatacttggtaccatatagcagaggtaggctaggggtgtgcatggggtgttgagaaccacggagctgtgaggaccacatcagtgtgcggtggtcagaaaaggcttgaaagaacccctctttgaaattggaatatattttaaatatataacagagaagcagacatatgtctttgagaactcagattgatgagtttatttctggtttctgacattgtatccacatgcgagacctccaggtttgtttgaggctaaatgagtatttcctacgtcttagtatctagatgtttttcattgggaaaagtgaaaatgatttgaaattcattttggtttctttataagattttaactttgaatgggaacagtgaataggctggaatgcatttctatgttatctacttaatatgaacaatcatgttagggaaaatgtttgaaaaaatcttgtacatttggaaactcaactactgaaggtcatggaccacattattatatatcaaaatgccatagcaacttcagacagacaacttggcttgtattagcatttccggtaatgagtgagcagggaattatttggatgacaggctgattaccttagaaatggaatcatttcctaaattatgggtcacaagttgaccttttcttttttttttttttttcattttcaagaaactgagatcttgctctattttactgatcatgtaaatgagcttaaagtgactggaattctacttagtgtattaattttcataccaattcttatggttaccttaggaagagctgctcagttgtttaaaatgtagcttggtctatggttttaattatctgttttacaaaatgagctttttgcatcttggaatccttctcttctcttatgtattctgaccttgaagggtcactgtatttggaagggatgggaccatgatctcattctttggaatggtttgtaatcattttagttttaaggaaccacaaactcaccttcaagctgtgtgtacaactgagcccatattagttgaaattgtcatgcttgttagaaatgcccacacacaaagtgcagccagatgtgtcacagagaaaaatatgtaagccaattactttacatacagagcaggatgctgcggaaaattcatccaagtagccctttcaatctacctattttgaaaatgttctctataagctctagcagtacagaatgcacctgttcctgggcctttgttcaaaataatgtctgggcctgagggagctgatttgtggcacaaaaggtctttagatgagcagaggcccagaaaatttccttagctccataattgaagtgaattctctcccaagttgagcaagagaagaagaaaaggcaacttcttcctcacgtagtgccaggtgcaacataaataaagcagcaagttgctttaaatctttcttaagataatggaacaataggtgaggttagggttattatcacagagcttcgatatggacaggacttagtgttgcttttaaaagaactaaattgcaggctgcagacgtaagtacagtatgccgtaaaaactttgcagatacctgagtgttgccaacaaggagacttgctggctgagacgactgatagatgggataatggagcctttaataatagctgtattgctaaatcctttccatcccaggttgggagtgactgaaagtagtttagtccttcaggtagaaaattgatactctgcaatgtgaatatcctcttctccctcaagcttgcttgtttcctagctgtccgtcattcaatgaataacaaaatctgtccttttctcccttttcctgtttcagactttaatagctctccctgccctcttagggctctgcctgctttaattggcaaggcagtcatagcacacagccactctgtaccactagattgcctccctgtgcctgggcaatttcagaaaatggtggttttcctttcgtttccatcttttttaagacttaaaaagtatctgctctcattttctcctagcggcctccatgccttgactcaaaaaatgctgccttagttgacagccttgaaatgagtatgaccctagctctagttgggtggaaatcacctcgcatagaaatagacctggagggccgggcacggtggctcactcctataatcccagcactttgggaggcccaggtgggtggatcccgaggtcaggagttcaagaccagcctggccaacatggtgaaaccccgtctctactaaaaatacaaaaattagccgggcgtggtggcaggtgcctgtaatcccagctactcaggaggctgaggcaggagaatcacttgaacccaggaggctaaggtggcagtgagccaagatcacgccattgcactctaacttggcgacaagagcaagactccgtctcaaaaaaaaaaaaagaaagaaatagacctggagataagccatctgcagagaggtgcccatcacacatggagagagcctctgtactgtcgcaaagtcagcactttattctgccctgtgacctgtccctcagccaaaggctctgtgactcatggccatgctatgctcagaagccctgtgtggtaggaactcctgaagctaccttgggttgccattagcccagatactaaagtgcctggcttgttttgtagagcaacctttttattttcagtgttcctattgcttaagatgggggcggggataaaagatctaagcactggtgtgaaagatgaggtgaagacaaatacaattaagaccaaaacattcatttctaaaaacttcatgagggaaacgggtgtgctttgcagtcttttcagccattactcacatccttaggagcaattaagcttttcaacattcaagacccacaagagttcagtcaatagttacataattatggcatgtgtgggtgggtgcggaaggctgggaaggcacgatgggtagacaaaagttaacgttgttttgattaaaggttgtacataagtctactgaagaaaataattaccaatattagcactggccacttttcaacagagtcaacagttgacactcttcacatgatttaatggcataaaaatgatttctgctccctaccaaatctttaaattgctactcttatcagaatatggaattcctattagggtcacagctcatgtgaattgctaaagtaaggattgtgaatctcaagggaatgccattagtctttttgtcatcagcatcattctcaccatcatcttcatcacaggttttcatccaaagtgcctgaatgttttgtattttactttttgttttctatatgtgcccttggacatacaaaattttgcagatttttatcattcataatttaaggagaaaatctgctcaaagtgatcctttataaaaatattacatatgtgtgtggatatatatatacacgtgcacacccacacatacttacacactattttccttatctataagaagaaaagtgatagattatttgaaattattgaatattctatgtatatgttaatataacaatgattttatttcataagtggcagcacactcgcatattaagctgtcaaagtcttacagtattacctagttctaattagtactgaaactttgtactgtggatattcatgtttgttctttactctgttaactgtctattaaatatttcgttttgtattttcatttttttctatttttattttgaagcaatgattttatttaattaagagaaatgcttaaagacttaattcataaaacaccgtatgagaccattacaagcatgtaatctccagcactttgggaggcaaaggtgggaggatcacttgagagcaggagttcaagaccagcctgggcaacacagcaagaccctgcctctacaaaaattaaaaagaaaaaaaaaattaaccaggcatggtggtgcatacctgtagtcctggctactgaggacagcttgagcccaggagtttgaggctgcagtgagctgtaattgtgccactgtactccagccttggcaacagagcaagattctgactctaaaataaaaacaaaatgtttaaaaaaaaaactgtggaaaatatttttttatattttaccctactaaatgataccaacattgtatagcttcctcaagcttgaattattatccctttataatctatgagaaagacaagtactttgtagtccacttacaaaaaaaaatacatatttttcacttgtggttttaaacataggccatgaagagatttacatatcatggctctccagcatcctgtgtaatatatactcgtgtgtttatttccatcttacaatctctattgttattatggctctggcagccatgttttttttttatttaaaaggtcattgcttgtaaccaatttcatcacagggttatttgtaatttgcactgttagaacagagcttcgccttgttctctggtgaatctccagagttattacagttatgcctgcgcaggtatttccctatgtgggtgttactttgtcgctgcagttgttgatgatattttatttgaaaacatacacttctctgtgaggttacaaattacctcttttcttcactttatttttgtgcttggactcagatacattattttgttcatgccatagggattgaagccacagtgtgtaaaattccagattgccattgtaatactgttcatccagtttttgtttttaagaggtcttcatttaaattgtgaattagaggggtgatttttattcaggtcaagtgtcaaacttgccgggatgaacttatttagttgttgctctgggctggtcatgtatgcaatcttccttgaaatatgtgacctgttagagggttttatcttaaaggtaagagtgattctgtttagtaacccacccttttgcaagttctaaaaagagaaatggagtaaactattaatggtgaagccaatgtttatgtttcttcctggtgagcatgatagtatgaaatatgtcagtttgctgatcccaaactcattcactccttttaagttttcagaccccatatgctgataatgtcatcattggaatgtatccagatccaactagatacttgtagctgataaagtttgaggcgaacagtgtcagaaaacacacagcagagaaaacaagtccttcaacttcttttttctctgtcagaagcaaattttcaggcctatgggagaaacaacttaaaaatacacctgaaatttctacaagaccttgcaatttcccttcacatctccacaagcagcttgtcacagaacagcacgagcttaaaaagctggttactaaatcctgctgcagaatgccagatctttcaagactgtttgacacatgcatatagtttacactgagtgaaaaggaaaggaaaatgtggttcttttgagggtgtaaaggaaatggtgtagtgttttctttctgtccagtggtttatctcaagcttcccattgctcaccgtgacaagaaaacagctcagtttcctttttggccagcctcatcaagtgtaatggaagaaaatgtctgtctcttttaatgcagttgatgaacaattgtttgcataagcagaactcgctcagcgaagtgtttttcttgctgaaggcctcactgatgtgttatttgaacggtgttgtgaagcgggtctctgaatacacatttgttccagtgagtgtggttataaagcccctagtagagactggggtattgtaaagcctaatctcctcacacattatttttgtatcgggatatttttaatatgctcactaactaagcccatatgctttgaaatgtttgtcctgtatattgcttcattactgcttatcaacaagtaaggttgtgctggctttgcagaaagagaacaatagatgatgcttgatttctttctgtgctggccaaagccaaccataggagccattcttttggtaacaaggctacctgttatcttacagctcgccaaatgaatgttcagactctgttgttttagaaaatcattatcagggcaaagtctaccattagctttcaactctaaaagaaaatcaataacttgtttcaaacagacattcctcactcagactatgcctgttgcacaacgttgcataacagagggggaactgagggtggcgagtactgaaaaggatcacttaaggggcctactgctgatgctgtgacaaaccattgggatgtttcataaatgtagaggcaccattgtatattttgagcacagctacttttatttcaaaaggccagatctagaaggtaaggtaaccattgtcagtgagaaattgaagcatcccagaaacctgatctataccatgcggtatacacgttcagtaatctgatttcggtgagaagcaccaatcaccagatgacttgctgaccaaagtatgttttttcttttctttcttttcgtttttccttttttttttttctttttttgagacagggtcttgcaccatcacccaggctggagtgcaatggcacggtcatggcttactgcagcctcaatctcctaggctcaagcggtcctcctgtctcagcttcccaagtagctgggatcacagacatgtgccactgcacctgactaatttttaaaatttttttgtggagacagggtctcactgtggtgcccaggctggtcttgaactcctgaaatggagtgctaaccaaagtatttagttagaaggattgaagtgttctctataggggatgattaacttaggtaaattgccatttcctaataactaaggtaaaatgcattacctaataaccaatttaagtagcgagtagcttttgggtttgttcttttgataggcatttctgttccctgtttggctgccatctgtggattgcaggagacctgttggtacctagtttaaactaatcttggcttaaaatttcactgtcatcctgtactagaaagggaatcagctatactgtatcctgctgtaaaactaaaatatatacctaccccccaaaattcatcaacatggccacctcacaggtgtgcactcctggactttccctcttttgagagttgtagcaaatttttatttatttatttatttttggcattaacatcttctagtttttggaagagcctcattcttattgtatctgctctgtgtattctggagagaggtaaatggtgtcttatgtcagcatttaccaagcctcattataaagactagacgctgggtttagtggcttacacctgtaatctcagcactttgggaggctgaggcaggattgcttgaggccaggacaacatagggaaaccccatctctaccaaaaaaaaaaaaaaaaaaaaaattagccaggcatggtggcctgtgcttgtaatcccggttactcgggagactgaggtgggaggatcacttgaacccaggagttcaaggctgcagtgagccatgattgcactactgcactcctgcttgggtgacagagtgagatcccatctctaaaaaaaaaaaaaaaaaaaaaaaaaaaaattaaagaagactagaaagtttgatctcttcaatttaaaccacatgccaaagccaaaatcacagtttaagaaaattgagtgtttatgggctcataagagcaaatatatgtatgccacttttctcaaagaaacgattttgaaaaacaaatcacagaattttcaaaattttcaaagtcaattcataagaatcgaaatggagtcaaccagttgtgtgatctgtacagaactttctggttaacgatgtgcttgtattttcctcttccagccgaacgcacggccggcgacgcagagcgggcgacactcggtgtccgtggaggtgcagatgcagcggcagcggcaggaggagcgcgagagctcccagcaggcccagcgccagtacagctctctgcctcggtatgaggacgcttggccgagcctccagatccccccggccctttaagatcccccgccctttaggaacgcgctccttcccaagtcactggggcctctccagcttgcccctggtagcaacagaggaaccaataaatgtcccgtggctactgttccttagcgtggggggctgtcgtactgcgaggccaggggaaatgcccattgcaggagatgccagtattttcacccacaagctccctaaaaaagtgaagcgactcgtgtactggcttcttagtattggctctcctgcttcctgtgtggacaagacagtatcttcatctgaaaaatgggaagataacccttatttggcttagcacatatggttattagaataaatgatacttcataaatccagagctccataaaaggatcgagagtcagtgctgcatacgccgtggttgtgtgggatccatggtcccaaacctcactctcttactgtcccatcatcactgctctcacccatgtttaactttagagggtctcagggatgttgagcttgttagctgggaaccaagcaagaaacccttacttgcctgctccccaggggagacgccttggcccagttctccgacaaaggcctgcaagggtctcagggtgactgagtgccagtacattgaaatagtaactatttttccatcaaagtttttcttccaggcatagtaaagaataaaaatgttgaaaaacattcagctttttaaacttcccaaaacaggtgactcctgtagtcacaattcttataggcatttgttgctgtatttcaaaatcaggtgacaaagacatattttaagtgggaaaagattcatttgccatgttgatatcaggtagacttttgactttgagcaaaacagttttagggagttaggagacaaatgcttatcttgactgaccagtgtagagtgatcttgatcaatttctaataaagatgagtcctggccaggcacggtggctcaggtctgtaatcccagcactttgggaggctgaggcaggcagatcatttgagcccaggagttcgagaccagcctgggcaacatggcaaaacactatctccataaaaaaatacaaaaattagctgggcttggtggcacatgcctgtaatcccagctccatgggaggctgagatgggaggatcgcttgagcctgggaagcagaggttacagtgagctgagatcacaccactgcacttgcctgggtgacagagcaagaccctgtttcgaaaagatgaatttctttacatgttaaataatcactgtaacaaccacaacggacttcaccacatggatacaggtcagccaaggggacatggatgtgaatgagtctccatggggataagtgccatctattgtagcagtttattcattcagttgttctttttcaatccataaggctatataaaacccctttgagtactaaattattttttcctttaaagaggagaattgccaggttctttagcctgctgtaggtaagagtcattaaagttttggtctttataggacctttgagataatcttatcttacaaggaaacagctcagagtaagtaaatttcccccagctcacacagctagcaagtcattttgccagcattcaaacctgaatctgcccatgccctaaaccatgattttataaggcccgttgctatcaagggcttctgttcccaaattttttgagacagagtcttgttctgttgccccggctggagtgcagtggcgcgaccttggctcactgcaacctccacctcccagactcaagcaattctcatgccttagcctcccaaatagctggggttacaggcgtgcgccacctcgcctggctaatttttgtatctttagtagagaaggggtttgccatgttgtccaggctggtttcgaacccctggcctcaagtgatctgcccaccttagccccccaaagtgctgggattacaggtgtgagccaccacacctggccccaaatttgggatattaacaggtgcaaagttcccctcagtgctctcctgccctcagcatttagaaggaggtcactgtgtgaatcaacccagtgaatcaaatgcctaagcacttgaagaattagacatcaaggttggtctgtgtaaaatccaccctatcccccactccgctacccccctgccccctccccactgccctccagtctgtgtggctgcattccatcggaagggtgagctgacagtgtggacgaattggcccacctggcatggccctccctgcacgaccacacgggtgggccagggcacttcatagcttgtgtggatggtgttgtcagggcaggggctgtgttcttatttttattggccagttgtttggcttcatatattttggccgtgcctgagagtgtctctaaggattgaaggagaaacataacaaagtgtgtataatgagagcagtgatgtgggagctgccaagggctgagaaagggaggtgggagagagagcggtgggcgggccgggaaggcagggcagttgccagggagaaggggcacttgggtcccagtcctcagaagaggcaaaagacagaggcaggtgcttccactgaatttctcctggttgcattccaaagtagctcatgcattcccgccgaacctttcatcctcgccttcccattcctctcccttctttactctgagccccgacatctcttcccttctccgcctctccctgcggaagcgcctggtagagatatctatatttacacgcagaggagggttgcagccgctaccgctagtgcctccgctgttatttagtggtgccctaaataactacagctttccctctgggttaattgtagctccctatttttagtcattttatcctatttagatatgagaaaagcagacatcctcaaattaaagagttatgtaagtttgggcagcggaggctggtaggtttctgcagtatcttcttgtcttcctttagagaacaatttatcaatgagaatcttcctgtttgtgagggagattaggaacatagaaccctgcgttcggcttgatgccttgcaaagcagccccactctgtggcaggctgtgtgcagagatctgagggaagggaaagaaagcaaacaggaggtcaggggggactgcaaccacctccgtgagcttgagtcaagtccaagtttctgacatgtgatattcttcaaagacacttgacctctgcttttcggatgttgacaattaacagagttttgtctaaacaagttggtatggcattagaaaccaaaaagattacacacagaaaaaaagtatagttacaaagtggagcgtaaaataaaacaaatggtctgggctttgtatccgttgcattagataaggtggtttgaattagaggcatgtatatgagaaagagtggtttgtaaattctaactgtaagtaagaaactctatggacagaaatcaagttacattttggcatgtcaatgagaaacactggccaggtggtaacactagttggcaggaaaagggacctgtgtggtggccccacactcagttctcaatcagaataggatttttgtttgtttttctttttctaaaataatttattttttattataaattataggctgggcgtggtggcttacgcctgtaatcccagcatttgggatgccgaggcaggcggatcacaaggtcaggagatcgagaccatcctggctaacacggtgaaaccttgtctctactaaaaatacaaaacattagccaggcttggtggtgggcgcgtgtagtcccagctactcgggaggctgaggcaggagaatggtgtgaacccgggaggcggagcttgcagtgagccgagatcgcgccactgcactccagcctgggcaacagagcaaaactccgtctcaaagaaaaaaaaaaaaaagaaaaaaattataaattgacagtttataattgtataatttgtggggcacaaagtgatgttatgatttatgaatatagcataaaagaattaattaagtttaatcaagttagctaacatatccatcacctcaaatatttactctctcagcagctgtgaaatgtacaatactctgttattaactatacctaccatgctgtgcagtagaacagaaaaattgctcctctgtcattgagatttgtaccctttgacatcatctttttttaattcctaaattagtttctttccttaatatccaaaaggcagcccccaaaaggaatagaggcgtgcgtagtcacaggcactggtagagagaaataaggttcttggtttggtgtttcccttcattttcttttcctgcctctccatttcttcttcatctttctcccctccctcggctccgtgtctgctgtggtctgacttcctcgaaagccttgtatacctcaccctccacgctgtgtctctgcaccctcccgcgttctctccacgaggcccatttgttatgtctccaatctacttcccaacttcttagcctcgctccctctgtcttcctccttctgtctgtgtccccctcatcctggtggcttaatggctttcctcgggcatcagatctttggtttgagtcctctccatgctgatggtctccaggccatgttggaggtggttgtaatctttaggtgataatctttaggtgatagttattgccaaaccatggtacgtggtaagtgctttgagtggatttagcaatgtccaggggctcactgcaggaccaaacaatcctatatgttggttataaagaaattcaatgaaaggagattgatattttgttgctgttgttacccatggccttagccaagggctcacaggacagtgggaagaacatgggcttccgtctgatctctgcagcagtgtgccaaagttgccctcgcttagtaagggttcctttctcctctgatgcttttctgtgtcttggcatctctactcaatccctccaaccaaggaagggaaagctaactttaaaaaacaatttttggccgagcagagtggctcatgcctgtaatcccaggactatgggaggctgaggtcggcagatcacttgagttcaggagttcaagaccagcctggtccaacatggtgaaatcccatctctactaacaatacaaaaattagccaggtgtggtggtttgttcctgtaatcccagctacctgggagcctaagacagctgaatcgcttgaacccaggaagtagaagttgcagtgagccaagattgcaccactgtactccaccctgggcaaaagagtgaggctctgtctcaaaaacaaaataattaaattaaattaaaaacaattttcttctttggtcaaaaagatgcctccctaagtcctgagcctttttttctttttctcctcttttagagatgaggtctcactttgttacccaggctgcagtgcagtggtgcaatcacggctcactgcagcctcgacctcctgggctcaagcaattctcccacctcagccacccaagttgctgggactacaggcacccaccaccacacctggctaattttttcaaaacatcttttgtagagatggggtctcactatgttacccaggctgatctcaaactcctggcctcaagcagtcctcccacctcatcctcctaaagttctgagattacaggcctgagccaccacacccaggctcagagcctaatctttgaaggcagagtgactttgtcttcaaactactcctccgggacctattagtcaatcacttactgagtgcaagtcacttttctaagcactttacatgtgttatttcatttctttctccccacaacctttcagggttagagattatgcctgtttcataggtaaggtaacttgagcccagtgagcagaactcgcccagtgtcacacagccagccagtggcaggctcaggatttgaatctacgttgctctaagcctaagccactcccaccttgcccagctggatgcttagtttcctagtgtaggaaactcttattgtctgtttccttcccttggtctctacaattggcccatttctcattctctccttaatcaagagcatatagatactgctaacttccttaccaaggaattgtgtgtgtgcgcatgtgtgtgtgtgtctatgtgtgtgtgtgtgtgtgtgtgtgtgtttctgtcttatgtgcattttacccacatatcttacttcagacctcagggcagtctgcttccttctctctatactgattaatttgaagaaaattttagctacaaaaaattggttctcccacattgttgtaatttccatccctaacaaacctttagtgaattctccctgtttaaatgtagaaagactgtgtcttccggggatgatgcagaatccacttagggtgcacagctgccgtagagcgaagcctggggctccatgaagctggggaggaagggggttggtggatcttagtaggccagagatgaaaaagaggtgaaatgtctgcagcctatttctgattatcttcaaactgataactcataaaagaatcccatttttgttgctgtaatatcagtcacaagttccttgttttaattaaagtttcatgattaatgtcaaatccctggtttcatgccggcattttccaacagtcttgtctctgggtagattaatttatgacttaagtgaagataatcagtgctttaggcaaataaactattccatcacatctaaggattcttgcctgggctgactgtacaaatggtgcagtcttccgttaaaagagacagacatgctatggaatgctcatccagtcatcgtcatagccagaggtgatgctggacattatggtcattttctttactgaaaatgttcccaactacattttaggccatatggaaaatgggtgcatttcactccaaaccatattgatgcaattgtgaatgttcaaaaatgcaaattgcatcattcctgcgggagatgcagtggcttcccagaccttcttttccttccgtgaaaatctttgtgaacattcagctgtgttgtgtgtgttgatggagagggttgagcaatacatactgtcgccaaatgattttcttattgataaatggagcaatatactttgttttattactcaattgtctctccccctcttccattttcaaggcaaaaaaattagggcatgtcttcctttctggcacagaattgttttatttcatcatagccaatcttattgtaaattcataaaaccatctagagacttgatagtaaattaaagatgtttcaaaacaataatgtttcctggaaatcatgcccaactctgttgcagaagtgggaagaatttgaaatttccatgtgactctgatttacttgcctatcctggggtgacagaaagcaagttaagtaggtcaccctggcctttggtgaaggtaaatgtataagaaaatagtgcttactttacagacttccggactctccgtccaatctggatgagcaggtatcccggagagtgtaagttgctgacatacacaacttgaaagccagagctttaagggactgcctgttgcattttttatcataaaggagtctagacttaaatctttcataaccgaactcatactgtaatccattacatgtacttcatattagctagcgcttctggcattatggtggcagctgtgtaaaatatttgttgtgcttgtttagaattgaattgtaatgttctaaagcgagcaattattcctaccatggaagctgccaaacctctaatacttctatactttgccagtgtgtctaaattgcaggagatattggtaccctaagcagaacagacacaaccttctcagacacaggaggatgaccctgtttctaaatagctgcacagtctagttctctctcctgtttactcgttgttagtttagttgtctaagactatgcgcttgctgaggacagtcatttttgaattctccagcccctatcgcagtgtctggcatgtgatgagagaacaggaatatttgttgaaaagtgaaaatgcatattccatcccatcctgccccctttcctccctctccctccttcttcctaccctcacactaacctttgggttttgctttctaggcaaagcaggaaaaatgccagctcggtctcccaggactcttgggagcagaactactcccctggggaaggcttccagagtgccaaagagaaccccaggtactccagctaccaaggctccaggaacggctacctgggaggacatggcttcaacgccagggtcatgctggaaactcaggagctccttcgccaggaacagaggcggaaggagcagcagatgaagaagcagcctccttccgaggggcccagcaactatgactcgtataagaaagtccaggaccccagttacgcccctcccaaggggcccttccggcaagatgtgcccccctccccttctcaggttgcgaggctgaacagacttcagactcctgagaaagggaggcccttctattcctgagcacgcaaataacggatgcttcatgtcgcgcaataaaagacattttcctatgaagacttgtattttgggagtttttttaaaacctcgatggtactatggagtatttctgttgttggtatcagtgcctttaagcggtgtaggcaaagaaatggaaggccttaatgtctttgccactatgtctcaagtgtctgtttcatggaaggatttcccaccctgtgacaatcatctgtttgaggtgttcatatgctctgcgcctctccacagtaccaggaatctcggccctactcatgagttgtccgcggcttggttgtaacatccctgcaccacttgcagtgacaaattcacctgaagtggaggatgacgtgcggccctgtttctccctctaagttctcttagctatgggatgacatcttagtctctggtggaggaaaagtgggcgacatacaccaaaaattggggctttctggtacttcacagcacagccatttgtcgtactttgtcatcactgtggttttctctttcctttctcagctctttgtgacgggagagtcggtcatcctattacagaagctaagccatagtccaacattgtttggtcaccatgggggtccttttgtaactgccttatgactcaacattaccaataaagtgatgatcctggtctgcgtttatacatacgcttgttcggtcctgttcctgacacgtgggttgagtcaccacagctctgtgtggggaacgtgggagacaggagtggctcctgccgggggaagctgggcctgccattggccctgtgtctatcatgaggggagagctaagaaagaaattctcctaggaagagctcatggcccagtacatcctagtaattattttaattagtttttgttctgacagcttgtcaggaagggcacagaatgggacagagataaaccagacagtcattttgatctgctctctacggtttttcaagtcagaggcaattgatgcttgtctaatgcatccacacactgcatgtctgactggcgatgccgcgctcctaagtagttctgccatgaaacataaaagacaaaggaaaagccgttacacatcacacagagaacattttcgggtcccacagcggtggtggcaggaagctcactctcgcgtcagtattagagtgtgtgtgtgggtctcggggatctcggtggctcccatcttccttcattgttctgaacatcctgtattgtaaaccatggctggggtgctaaagtgcctgtgaatcccgatgtggaaaaagctggaggtgaaagctcagcataccatgtatttactttaaaaacagaaaaaaagacatgtatggatatgtctattttttttttattggcacattgtatttttgtgttgacttgtttttagaaatgatgtgtccacacacgtacccgtgtctcttctgcatttctgtgtcatggttctgtttcttaatcacgtgcggcggtgtctaagtggtgttaccagtgtacgcgcagtgaccttggatgacagtggctctttctcacagcctcccctgagctgtgagaaacagctttctctgtacatatgcaactcctaataaaaggcatatttcttcctgtt

SEQ ID NO: 471 - DNA, 50235 bp, Homo sapiens
  source 1..50235: mol_type = genomic DNA; note = NC_000010.11:69124178-69174412 VPS26A [organism=Homo sapiens] [GeneID=9559] [chromosome=10]
gaggtcacgtgacggagcgccggagcggagggagccggggctgggagttctcctgagggaagaggagtggagtaggggggacgcggcggcggcgttgacaatggtgagtgcgcggcggccagcgcgctcgcctcccgccctcgtcccggagcgcgcggcgggccggccaaccgcgggccgggcgtcgccggaggaggggacgggggagcagggcggggagcggggttaggcctgtcgggccacccctgggtctgggaaaagctggcggcgccacctcttcccggtctcggcgaggcccgagcacctacgggcggcggcgtgctctcctggccatgtcggagcctctgcccgcgttcttcgactgcttgttggggctctggctggggactcggaccccgcctctgcgggggctggtcgccgcctccccttcctaggtagccagtccctgttctcctcccgggcagcctctcttccatccaggtggggcgacccgggagccccccacctccggactcttcgggggacttgggcactcagtgtgtcacgaacttgataaactctgatattttaaaacctgactatggtgacattctttgatttcatgaccccagttcaggctttctgttgacacttgtaaaatgggagagaaaaataaaaggacgttggaatgggggatatctttaactccagagacacccgtttggtgcccgccgttttaagcattggctctcatttccgtccgcaagctatttcgctgaacttaacgctctgggttgttgaaacggcctatgaggcagaggagggaggggaatcagtgctctcaccacagtccgcggaagcactagcctgggcattgtggtatttagctgggtgtcggcagtctctaggttagatctcattttacccattttctggtagtagtcgtcagttctcttcatttagcgcctactgtatgctctcctaatactacctgctcttcccaaagctcactgattcaatagactgcttgagacttttggcttaaaaggccgagccaggtatatttttaaaaagctactttgaataaataacttttaatttcagtaatgatgttgctttcaaaacaaaacaaaacaaaatccagacattcatgttcattcttagagctttttttctttcattcaacaaataattgctcaggtgtgcctaggggaccccagtaaaatggaaacagcgcctacctgctctcgtagcttacaatgtagggagagataaacatttatttgtgtaaattatttgtttaacgtggaaattagaattgtgacagatactaagaaggaagtattgggggaccttgcctagtcagtgttagggcaggcttctttaattgaatatcatttgaaaagaaaacttaaaaggtcctcctattttttgcttacatttgtaattattacttttaatacgcttttttgaattatgttcaagagcagtttatattttcaagttacccaaacagaaactaaattgtaaaactttaaaacactgaaatggtcacagatgtaatatatgtatgaaaatttgctgtttcattgcttgtgtatgggctaagtgaatgaattttgagagtcagccttccacctcagaaatgcaatgagttgcatttctttacatccactggacttagtgaaattccttcagtggggactaaaaagttgcctttttatgtatctaccatgtatttttgctaattggtaatgctcaatattgggttcagaaattatatgaaaaatcctaaattaacctaaagtcagtgataggaggtttaggccaagattagaaaactataaaaacaattgctagcatgtttttatagtcatatatattgcagtccagttatttaaaagctcaagagttttaacttgcatattaatagttaatcctgaaaatcgcaatattccaaatgcgcccttgaagatatctttaccaaaagaagtgagtagtatttttgcacttaaaagatctcacggggtgcggtggctcacacctgtaatcccaacaatttgggaggccgaggtgggcggatcaccttgaagtcgggagtttgagaccagcctggccaacatggcgaaaccccgtcttcactaaaaatacaaaaacaaaaaaaaattggccaagtgtggtggcgcattgctgtagtcccacctactcgggaggcggaagttgcctgaccaacatggtgaaactccgtctcaactaaaaataaaaaaattaggtgtggcgcacacctgtaatcccagctactcaggaggctgaggcaggagaatcaattgaacccgggaggcagaggttgcagtgagccgagatcgcgctgctgtactccagcctggcgacagagtgagactccgtctcaaaaaaaaaaaaaaaaaaaaaaatctcaaaactgaattgctgtctgcatcatatcctaaccctcaacaaattttattctctttccttctagtctttaccagcttgacagttgtgtattttacttcctctttaacatatcagaagtattagaattttatttagaataattagaaaaagaatttaatttcattaccctttatttcaaatgacagaagttgcacatcttagaaaaaactttgaaagagagactttgggtagagatctttctctttcagttctttctaaaagacaagcttttttcctcagttatttttttctttttgttctctacctgtaaaatgtaagatatccacaattttctggaggtgttttttagtaagactagttcttttattattattattattttttgagacggagtctcgctctgtcgcccaggctggagtgcagtggcgcgatcttggctcactgcaacttccgcctcctgagtagctgggactacaggaatgcgccaccacacccggccaattttttttttttttttttttttttgtatttttagtggagacggggtttcgccatgttggccagactggtctcaaactcctgacctcaagtgatccgcccgccttgtcctcccaaagtgttgggattacaggtgtgagccactgtgcctggctgactagttcattttcgatatgccctaatgtaaaaaaactgaatgttggtcgggcgtggtgcactttgggaggccgaggcgggcggatcacgaggtcaggagatcaagagcatcctggctaacacggtgaaaccccgtctccactaaaaatacgaaaaattagccaggcgcggtggcgggcacctgtagtcccagctactcgggaggctgaggcaggagaatggcatgaacccgggaggcggagcttgcagtgagccgagctagcgccactgcactccggcctgggcgaaagagcgagactccatctcaaaaaaaaaaaaaacctgaatgttaacccaatgccatattgtcatggaataactggttaaagtgcagtaatttattactcaacctattacttttttgcatatgctatactaggctttttaaaaatgccatttgattgcttccaattttagtgttttgattgtatttaaaaatatcttttttttttttttttttttttttgagacaagctcttgctctgccgcccagtcagtggcttactgcagcctcgacctcctgggttcagcctcccaagtagctgggactgcaggcacacaccactatgctgggctaattttttaaatttttgtagatatgggggtctagctgtattgacgaagctggtcttgaacttctgggctcaagtgatcctcctgcttcagcttcccaaagtgctaggattacaggtgtgagccactgtgttctgctactttttttaaaattatgaaatatttcttgcatccagaaaataatagaggatagcacgtagtttttcacatatttttaatggttaggaatttaaatatttaaggaatggtgtcaaaacactgtttatcattatggtgttaattgtgaaattttataaaatgaacttggtttataccattttaattggtggcaattttagttctatcaaaattttatttaactttgggatttgatttttttttttttttttttgaggcagaatctcactctgtcgcccaggctggagtgcagtggcaagatctcggctcactgcaacttctgcctcctgggttcaagcgattctgctgcctcagcctcccgcatagctgggactacaagtgcatgccaccacgtctggcaaatttgttctgtttttgtagagatggggtttcaccgtgttagtcaggatggtctcgatctcctgaccttgtgatcctcctgcttcggcctcccaaactgctgggattacacgcgtgagccaccgcgcctggcgatttgatcttttaatgtcagctttcaaatcccaagtggaactctgtgtgtttaggtatatgcatgtggaaaaaagttataatatttccttttctctgtaaaacaatttttatagttttcaaatctcatttttcttttaagtagctctgggaagtgtcaggaggaatgagaaaattaattttaaggccaagcaaggtggctcacgcctgtaatcccagcattttgggaggctgaggcgggtggatcacttgagcccaggagtttgcgcctggcctgggcaatgtggcagaaaccctgtctctacaaaaaatataaaaacgagccaggtgttgtggctcacgcctgtagtcccagctacttgggaggcttgaggtgggaggcttgcttgagcccatgaggcagaagttgcagtcagctgagatcataccactgcactccagcctgggtgacagagtgagactctgtctcaaaaaaaaaaaaaaaaaaaaaaaagaattaattttaatttttctatctctgttttataactcaaatgagttataaatgtggatgtcataaggaaggagagctcattcttattgctctctctgccaattagcattatccttcaatataactgattttgttttccatctaaaatagactgctacttgaagatgttgtcttctaccctttcatgattgctcctcccacacaacccctgtaccctgctagctcagcacatattcgattagtaaatgtgagctgcatgattttaagctgctatacattctcatttctgtagcccttagaggaaatgtactacagtatttcagaatttaccattttgagtttaagacttggagtacgaaagccacctaggaatggacagtgtgtgtgacctatcactgatgattttcattctcttttttctaaattagttcagaatagttttctgattaaaattagttttctggttaaaattcgagtttgttatttgtaattttgccagaaaagattaaaacgtgtcaaaaagaaaaaaaaattttttttttttttaaacagagtctcactctgtcccgagggctggagtgcagtggcgcgatctcggctcactgcaacctccacctcctgggtgcaagtgattctcctgcctcaggtgcataccactacgcccagttaattttttgtatgtttagtagagacggggtttcaccgtgttagccaggctggtctcgaactcctgaccttgtgattcgcccaccttggcctcccaaagtgctgggattacaggtgtgagctaccgcgcctggcccaaaaagaaaatttgctacatatgtcaaaagtactaatctggtaattcttttagttggttgcttaaaattataatcccttttgttaatacaggatttaggaaaacatctcatttgagtatagcatcaccttgtgccctacatagccacaaagcaagctaacagaaagcaaactaatgactctcctaagtgaggacagaactgaggtttaatataaattccattgatatagtttgctactataccaatgctaatttgctcagaaaggctaatattattgactattccagatttcagttaatttctcttgtatatttgtttattttctgttattaaaatggtatgtgtttgttcaaaattaacattcaataggtattttaatgccttctgctaaatgccatacgctgccttagatgagcctcatggagtttacagttcagtaggagagtcaggtactaagtaagccttgtgaaacctaaatttggagaatccagttttgattaggaagtcaaggaaggtctcatggagagggagtcaaactgaaactcaaagggtgaattaggttaagaatactttgcttggctctaagacaagaaggacactagcaaattggaactgttgaagaaagagctctgaacgttggaggctgagtagttggagagatgactagtgtcagatatatgtagaccacattagagaatacattgtgtgtgtgtctgtttttaaaatcacaactgaagtaaaataactatgaaaaagtacacgaataggtgtatagcttgatgaattttcaccaagtgaaatacctctgtatcaaatgctcagttataaaaaaaacagccagaacattactagcagccagaagctccctttgtgctttctttcagtcactgcctgacctgtaacaccataatgtaccttacatgttttttgcttactatgtgagtggagttatacgtacgttttgtgtattccttttgtgtctggcctctttcactcaacattatgtgtatgagattcattcttgtgtgtagttgtatctcctctaattctattgctgtttggtgttcccatttgtatgaatatatactaaattgcatatatccattctcttgttgattgatacttggattgtttctatttggggctattatgaataacacttgtgaacattttttttctggagacaaattcttgctctgttgcccgggctagagcgcagtggtgcgatcttggctcactgcaacctctgccttctgggtccaggtgattctcctgcctcagcctcccgagtagctgggactgcaggcatgcaccaccatgcccgactaatttttgtattaaagacggggcttcaccatgttggccaggcttgtcccgaactgctgacctcaagtgatctgcctgccttggtctctgaaagtgctgggattacaagtgtgagccagcgcgcccagccagatatgttttttaaagatcattcagagccaggtgcagtggctcacgcccataatcccaacactttgggaggccgaggcaggaggattgcttgagcccaggagtttgagaccagcctgggcaacagagtgagaccctgtctctacaaaaatttttttaaaaaagatcattctgggccgggcgcggtggctcatgcctgtaatcccagcactttgggaggccaaggcgagtggatcacgaggtcaggagatcgagaccgtcctggctaacatagtgaaaccctgtctctactaaaaatacaaaaattagctgggtgtggttgcagatggctgtagttccagctacttgggaggctgaggcaggagaatggtgtgaacccgggaggcggagcttgtagtgagccaagattgcaccactgcccttcagcctgggcaacagagcaagactctgtctcaaaaaaaaaatcattctggttgttatgtaggacagaatatgaagggatgtaggatgacatgataggagactgttctctgtgtaaacttaaaaagattagaagactaaatttcattgtggctaaaataatccataactatatccagtatcaaaattgctaatggattctgtattattaccaactgatgtgttttggcattgataagcaattgatctttgtcccttatatttgtcatattcaggatttatagaacaaggcttgtagattttctttggaaaaattcacagaaattttattttccttcattatagccagttttactacaagggctttcacagtgtaacatatcctgttcagaccaaatatagcagtagattttacagtaagtagtgcattatagtagtacatttggatttgtgtgagtactttgaattgtgtaaattctgctataataaaagaacctcataaataaaagtataaataaaggtaatttttcaagcctagctgttaagaattaacttcttagatttctgacatatgttaatatttgattatagtggttttgtatggaaatgattgaaattatagcatgctgaaatttgtttagggttttttttttggtctttttggtggttaaaaacacataacatgaaatctaccctcttaacattgtacttaagttgttcagttttgatgtagtttttttttttttctttctttcttttttgagacggagttttgctcttgttgcctaggctggagtgcaatggcgcgatcttggctcactgcaacttctgcctcctggattcaagtgattcccctgtctcagcctcccgagtagctggtatcacaggcgcatgccaccacgcccggctaatttttgtgtttttagtagagacagggtttcatcatattggtcaggctggtcttgaactcctgacctcaggtgatccgcccacctcagcctcccaaagtgctgggtttacaggcgtgagacaccatgcccggcctttgatgtagcatttgatatatgtttttatcatttccttatgaactcacagatttgcagtctatttaaccgtagttcataggtaattaaattcaaattataaaatgtagtgactgactaaacatgataattatgaccattttcattttatttcagagttttcttggaggcttttttggtccaatttgtgagatcgatattgttcttaatgatggggaaaccaggaaaatggcagaaatgaaaactgaagatggcaaagtagaaaaacactatctcttctatgacggagaatccgtttcaggaaaggtaaatcttctgtttgacaaaactatctaattgtaagatatcagaattagttatcaaagtggtctgtgctgtttcttaaatttgaataattttatgagggagagagatttttttttccctaaagttcagctaaaatatttgattgattagaagataatctttcctgcaaaggaaagattcttaccctggaaggctttcaagggaagagcctctaaatttcatgcaaaattttctgtttaagtctcctgtgtggttcatgaaaaaaaaaatattttttttttctgtttgtgattatgtgcttctgtctggtttcagacagtttcttcagatcggagctgtaattcacccaaagtttgtttttcctttaacattaagttagagattgagagtaattctctggtataactttctaaaggtttttttacattctttgtaacttacctctctgtactgctactattgtgtctgttgatcttatttctaggtactctgtagaggacttgagtacttttgggatgtgtctatgcatggtcagatatgtttatgacgccttctataaggtttcacttttttccccttttctttatccggtaatgtatacggttttttgttttgggttttttgggttttttgttttgttttgtttcgttttttaaatagggtctcactctgttgctcaagctggagtgcagtggtgtgatcatggcttactgcatgcggccttgtactcctggactcaggtgattctcccacctcatcctctctggtagctgggactacaggcacacaccaccacttcagctaattttttaatttttttgtagagatggggtttgtccatgttgcccaggctagtcttgaacttctgggctcaagcaacccacccacgtaggcctacaaaagtgctgggattacaggtttgagccaccacacctgactgattattcttatattttagggagtatgatcaatacttattagtggtcagtgatagtggagaatggtaatatcatagacaaaagcaaaccacaaaacatttgaaataatttaaaaatagaaaatactaggatttttctcccctgcttgttcagttaatatattcatgtggtagacagttttggaaatatatataatctcttcatatagaaataattcactgttaaaatttggatgtgcttcctctaatctccgcattaattgatatttatgtatatgtaatatattcagcatactttttcctctattgtttgatatttaagcagtttctgtttttcagatggctttcttcatatctttggtaatatggacatcggtatacgtaaatttttctctaaatttctgtaggacgagattatttccttagaatagattgctgaaagtgagctgctaggccaaaattcgtgaaatatctgaaggatcttaatacacattaatctggaaaatgtatttgcattaaattacatgtccacctgtgggtctttttcacccaaggcagcattgaatatgatcactttgtaatctttgctattttggtaggcagaaacaatcttattattttaatttgcatttctttggttactagataaattgaacttagatttaccagccatgtgaggttattttttttttttgtactgcattgtctcttctggtcctttgccagattacctactggggtcttagtgttgaatccgaagtgaattttttggttttcaactttacttcccttttattcttccttttaaaagatgaaaaaagaaaaaggccaagtgcagtggctcacacctttaatcccatcactttaggaggccgaggagggaggatcacttgagcccaggaattcaagaccagcttgggcaacatggggagaccctgtatctatttaaaaaaaaaaaatggagaaaaaggcctaaagaagagcagacaatcatcaaaaggatggagcatgtcaaatgaaagaagagtaaaagtagtagtgtttggcctattgaaatgacttgttaatgggctgggggcataggaataccaatctagctttctttctagggagagactgaacctagcatctcaggtatttcttttacagatatgacatgtaaatatctctcctactaatttgtaagctccttaagttcaggggatcagagtgtgcttctgtagtctccataaaatacatgatagtgttgattatataataggctttcactaaatatttatttggtttatttactgtttttaagtcttgtagagaatatcttcagtctagtttaaagtaatcttatgtcacctggaccagttgaagttcatggctgatgtttatgggataaaggaaaaggggggtgtttaaagtaaaagtaaagctactccagtgtgttctttaaaaagaatagttggtgttcaaattacattttgatcctgggtgtggtggctcatgcctgtaatcccagctctttgggaggctgaggagggaggattgtttgagcccaagagttcaagaccagattgggcaatgtagcaagatcctgtctctaacactaagtaaataatttttttaaaaattacattttggcattgctggaaaccatacgtagacctgatcaactatggatagcatgttttaaaatgataagatctcttataggtaagtattttcagttcaaaagttactatatcttgaatctgattgtttattggtttgagatttttttcatttttaatgtttttattgaaaaaacacgtgtagaaaaccatatacaacaaaaataaattattataaggcatattttcttattatcaccatccaagtcaagaagtagtactttgccagctaccccatgtgtcctgtctccatcacactcccatcccctcaaaagtaaccagtgtactgacttttatagtagtactttcttgtgtttgtttagtcttgctcatttaagaaaaatttggtacggtttttaaatctctcttaatctcaggttccctcttcatacctttctttaacttgcaatatctgttgaagaacacttggtcatttgaattgtagagttctctgtgtttgtgtattcctggtacagttattgcctatcagttggcagctaggtccagaggcttgaatcaaactcaagtttgattcttctggcaagaatataggtggtggtgtgtttttccattgcaggtgcaaaatgtctggttttctttctctgtcatttttcttttcttttctttttttttttttgagacagagtcttgctctgtcccccaggctggagtgcagtggcgtgatcttggctcctgcaacttcccgcttcctgggtccaagtgattctcctgcctcagcctcctgagtagctgggattacaggcacgcgccacgacatccggctaattttcgtatttttatttttaacagagacgggatttcaccatgttgggtcaggctggtctcgaacttctgacctcgtgatccgcccagctcagcctcccaaagtgctggattacaggcgtgagctaccatggctggccttttttcttttttgcaactgttgatactcagtacctagattgatttaactcattgggagttgcagaatggtgatactttaaattctgtcattttgtttttacttatgaaatggaatacatttacaaagagacgttatctatatcttgtgacctagtggtacagctcatatagaaaaaagaatgcttgacctttttccttttttggcctgttttgttatttatttatttatttatttattttgagatggagtctcgctctgttgcccaggctggagtgcgatggcgtgatctcggctcactgcagcctccacctcccggattcaagtgattctcctgcctcagcctcccgagtagctgggattacaggcacgtgccaccatgcccagctaatttttgtatttttagtagagatggcgtttcaccatgttggtcaggctggtctcgaactcctaaccttgtgatccgcccgcctcagcctcccaaagtgctgggattacaggcgtgagccaccgtgcctggcctttggcgtgttttaaaaaataataacttggttccttatcttccaaaggtgtaaactactagttttatttctcaataacttatataaactcatgatttaaacatacttgatgtttataaatattgccctattgaagctctagttgtataatcctctgtaacaaattaccacaaacttagcaacctaaaataacaaatttatgtcttaggatttttgtgatttagaagtccaggtggaggttagctgggtcctatgctcagggacttaccaggttaaaatcaatccaaggttgcagtctcgtctgaagttcaggattttcttccaggctcactggtttttggcagaaatttccttgttgtgctatgactgatacccttgtttcttgtgcagtaggctgtctgttcctataggttgccctcagatccttgctgagtggcccctttctctcagtttgcgttgtcttcaaggccaggaggagaccatcactctgacattcatcttcttttaaagagcttacctggtttgatcaattccagttaggataacctcccttttgattaactaaaaaaatcaactgattagtaacctgatcacaggagtggtatcctatcatattcactggactcacccacactcaagaggattatacacatgtgtacaccatgggatagtaatattgagggctatcttagaattctgcctaccacatttgtattgactcttatgaaaggacatgggggccctaggatttttctttttttaagctgtattgagatatatatatatatatatattcgccataaaaattcacccattttaagtgtgcttaaaatttttagtaaatttagagttgtacaactatcaccactaattccagaacattttcattactccagaaatttttaaaaatgctgtaccattagcagtcattctccatttcccctccttccagtctctgacaacccctgatctctgtttctatgaatttgcctattctggacatttcatataaatggaattatacaatgtgtggtcttttcctattttgtttctttcacttagtataatgtatttgagattcatcaatattgtagcatttgttattagtatatcattgttttttattgatgaatagtattccattttatggctataccacattcttgtttatgcattcaccagttggtgggtatttgggatgtttctacttttttgctgttgtgactaatgctgatgtgaacatttgtgtagcagttttgtgtggacctatattttcctttctcttgagcatgtacctgggagtggaattgctgccttatgttaaatatgtttaagtttttaataaactgccaaagaccttaggagtttttggtggctttcttgctaactggtatgacaagatgtttaagggtcttttgtgtttctgcttcatacctgcactcagccgtatctttcaaggccatagttgcatgcaaagattgctcattgctacagtgttggacattatttctaggctgctcagtggatagatggggagagtttttaaatatagatttaataaatttatttttatttgtgtatattgtttaagataaaatacttcaggaatcatattgtcatttccaattcaatttgaaaattagaagtttttacttaacctcttatgttacatgtatatctcctttcttctgcatcaagaatactgattttcagagtcaaaggaagatgtaattagcatatcccataatttactcaatatctttaccccacattatatacataatagtctcagaataacaatactaacattaccactatcaatatgattatgaagttagttaaaaaaaatttagcatttgctatttgttttactcacatttcttaaatgtaccatagtaagtacattgtcagagtgtatagtaattatatactttatgtgcttcctttcgccctcacttagtcttggttttataaataactgttcatatagtgtgcaccaccagtccttatatctttgtctctttatttgtttcattgtctgaagcttattctctagttactagagtctaatagattcctcaggaaatgctcatgggaacaataaggcctaagtttttgcatattggtaatggcttttttgtgtcctttacacttaaaagttagtttttctgaataatcttggcttacatttttttgagttattttatttattttctatttatttattatttttgagatggagtcttgctctgtcacccaggctggagtgcggtggcataatctcggctcactgcaacctctgcctcctaggttcaagcgattctcctgcctcagcctcccaagtagctgggactacaggtgcccaccaccatgtctggctagtttttaaatttttagtagagatggggtttcaccatattggccaggctggtctcaaactcctgaccttgtgatccgcctgccttggcctcccaaagtgctgggattacagatatgatccatcgtgcccggccttcttgagtgttttaaatctattattactgcattgtcttctggcatagggtattgttaacagttttttcatttgaggaaagttttcttgaattacagccattattaattagtatttattccattcctttgctttggttttcttcttgatatcagtatttttgagtcttgtttgagtgtggttttttgctcttgtattccttctgcttatcctttatttctaaaatgatttttacttctatttctaattcttttctgatttttctcaccctagcttaagattttctttcatgtattgtatcattttcttaatatcgtatagcctgttttgaaataaattacagttttgatctatcttgtctgtagaaatgccattctgttccttctctttttttcttaaaataactttgtatgggatttgaccttgatatatttatgttgctaatttttatgtgaaattagttttccccaatgttttttttttttgagataagatcttgctctgttgcccaggctggaatgcagtggcatgactatggctcactgcagccttgacctccaaggcccaagcgatcctcctacctcagccttccgagtagctgggaccacaggcatgtgccactgtgcctagctaattaaaaaatatatattttttgtagagacagggtcttgctatgttgctcaggctggtctcaaactcctgagctcaagtgatcctcccatcctggcctcccaaagtgctgagatgtgagccactgcacccgaccttctcctgaactttttgtcttttcgtgatagagtctcactctgtcacccatgttggagtgcagtggcacgatttcagctcactgcaacctccgtctcccaggctaaagcgatcttcccatctctgcctcctgagcagctaggaccacagggcacactaccacgcccaattattattattattatttttggtattttggggtagatacggggtttcaccgtgttgcccaggctggtttcgagctcctgagctcaggcgatccacctgtctcagcctcccaaagtgctgggattacaggtgtgaaccactgtgcctggcccttcctgaacttttgatggtttggtttaggatagtttttctaaccacctatcctagacagcaggcctgactggtcagttttgagtgttctaatattattggattgtgcaaaactccttccagcgttagctcttattctcagattgacaccatgctttccagtgaatatatatgagtaatttgggagttcttaggtccatcagacactccattgcattctttgattcctcctgcacaaccctagtatcatgcaggttttgtggctattaacctggtttgtccctacgcattatgttttgggattgtgggaatactttatctttttctgtggtaaattggatccttagatttttttggttttgctgtctagttggtccatctgtttttatgtgacgatctggggagattcaaagactatgttgccatcttcccagaaattgatctgagattctaaaaggccatgtgtaaccattctggcagtttagcaatatgtatcaaaatcttcaaaagtggatatcatttatagtagccagaatagtctggattattactatgtaagagacaaccccaaaactcagtgacttaaaaacaacagtggcagtggcttctttcttgcccaggcaacatgttccttgtgagttagctgagggccttattctgtgccatgctcagtgatggagcagccaggaacatcacactcatcatggctgagggagagaaatctctgcagagtctttcacaagccattaaaatgccccatcctagaagtaacaaagagcatttctgatcaaatttattgtctctagaaacagtcttgttcgtacctcacccagccacaagagggtagggaatacaatcataccatgcactcagaatgtatgcagctggaaatatttgagcagtgcctgtattgattaatattattttgatccacagattcttctgatcagattttatcctaaaataatcaactttgttcatttcactgtttataatattcaaaaattgaaagccacttaaatgtccagacattaaaaaacctaattatggtaataaccattaagtgcttagggccattattaatgtgattatattgatctgtattcattcacatgaaaagaggtttgctataataacaatatttactgagtactcaccatgacccaggtattccttctgaagttcttcataatgatacaatgattcctcttttttttttgagatgcagtcttgctctgttgccagcctggagtgccgtggcgcgatcttggctcactgcaacctctgcctcccgggttcaagtgattctcctgcctcagcctcccgagtagctgggattacaggcgcatgccaccacgcccggctaattttttgtatttttagtagagacggggtttcaccatgttggccaggatggtctcaatctcttgacctcatgatctgcctgcctcagcctcccaaagtgctgggattataggcgtgagccaccataccaggcctttttttttttttttttttttgaggtggggtctcactgtgttgcccaggctgagtgtagtgtcatgattacggctcactgcagcctcatccccctgggggcccaagtaatcctcctacctcagcctcccaagtagctgggaccgcagacatatgaaccaccctgcctggctaattaaaaaaattttttttttttatagatagggtcttgttgtgttgcccagtctggtctcaaactcctggactcaagtgattccccaaccttgacctcccaaagtgctgggattataggcatgagccactgtgcctggccaaggattatttgaaagattatcttgtgttcagtaaaattaggataactaaagaaaatgaaaaaagtggtatagatttgtaataacctcagaaagactatcttgacaacgagcttgaggcttttaaagctaagaaagacattttaaacctcatatttagaataagatgaataagaaaataatatgctcatttggcacacttattttaatataacaaatgcaaaagaaagctttccccccactattcaaaaaaaaaaaaaagatttaaattgggaaaggtaggatcattaaaaattaaaacagaatgaaagctttgttatggttaagaagattaaaaataaactaactagttttcaaacatcctggtgaccataccagacaaatgctatgcgataatactgaaagaattttgcagaactggtcaccaaatctctgctaggagtcctttagtaattgtggaaaatgagagaggttctagaatataagaaaagcccttatttataaaatggggtagaaagtttgtttcaggtaaacttaatattggttcctgacatatctttagattattaaataggtgatcagtgaacatgctgaaaagaaagcttaaaggaaaaagaggaggaaacaacgggttgtttacgaccaagcatgtgtcactaagaacaaatcttgccacaccaatctagggtttgtgaaatgtcctggtgtaataaaaagatcactgggctagcactggaagatctagccttaactttaccgctgtcttggtaggtaactctggacagtcatttaatttcctggatctcacctataagtttaggaggttagactgcctcattggtttccaaacttggctttgcactgtaggatgctctgcatgaaaatctttcatatattagatattatgttggatcttggaggtctgacatctcgcccacagcaagaataaattcctttttaatattcctgacgtgagtttctgtatgcctacttttcagagtgtggggattctgctgttctgttaacagtatccactctgctttttagagatacgcaaaataaatctaatccttttctaagtaagagttctctctaagcattttccacatcactgtcttgtttatcctgtcttctctaagctaaatatgctatttcctttagttattgttcaagaaccctgggttttgagtctttatcacccagattgctttcttttagttttcaaattaaatttaatttttttgagacagggtcttgctgtgtcacccaggctggagtgtagtgatgtggtcatggctcattgtagccttgacctctcaagctcaggcgatcctctcacctcagcctcccaagtagctcagacaacaggcacacaccaccatgctcagctaatattttactatttttgtagagttggggtctccccatgtttcccaggctaatctcaaacttctgggctcaagtgatcctcctgcctctgccttccaaagtgctggaatgacaggtgtgaggcactgtgtccagcctcagattcttacataactatatagaaaactggtttgcattatctgtatccagcagttctactcctagatacatactcaagagctcttttaagagcaattctagattttcagaaaaattgagcagaaagtagagttctgtgtactcccttcttcctcaccccagccccacatggattcactgttactaatcttgcattagagtgatacatttgttaaaattgttgaaccattattaccacattattattaactaaagtccatagtttacattagggtttactctgttgtacattttctgggttttgataaatgcataatgtcatgtatccatcattgtgatatcatatagaatagtttaaccaccctaaaaattccctgtgtttcattcacctagtcatgccgctctggcacctgcgctaccaccaccatccacacagtcttcggcaactactcatctttttactgtctataattttgtcttttctagaatgtcatgtagttggaatcatatagaatgtagcctttttagattggtttatttcatttagcaatattcttttaaggtttctccatatatctttgtgacttgattgctcatttatttttagtgccaaatcatattccattgtatggatgtaccaatgtttgtttatccgtttacctactatcttggttggttccaagttttgctcatttttctatctagttgactctttttctcttattgatgtgtaggattttttgtatgttcttgataaaggtgttttatatatctagatatggagtcctttgtctatgtatgtatcataaatatcttctcctaatttctggcttgactttgtagtctcttaatggtgtcttatgataaacagttcttaattttaatacactagatacataatgtttcctttttgtttatgcttttcatatctagtttaaaaaatctttgcctaccccttgggcacaaagatattctcctgttttttttcctcctataaatgttatttaattaaattaattaattaatttatttttgagacagagtttcgctcttgttgcccaggctggagtgcagtggcgccatcttggctcactgaaacctccgcgtcccgggttcaagcttttctcctgcctcagcctcctgagtagctggattacaggcacccacgaccacacctgactaatttttatatttttagtagaaactgggtttcaccatattggccaggctggtcacgaactcatgacctcaggtgatccacacaccttggcttcccaaagtgcagggattacaggtgtgagccaccacacccggcctaaattttatttttatacttcacatttagatccttgttttgcttggaattggttttcagtttgtctgtggtggtaacataggagtcaagtttatttttcttcttctgtatggatactaatgaacccaggatgtatactgaaaaagccatccttttccactgcactgtcataccacctttgtcataaatcagtctgtggtgtgacacaggagtcaaatgtatttttcttctgtatggatagctaatgaacccaggatgtatattgaagaagccatcctttctcctgctgcactgtaatataccacctttgtcataaatcagaggttgtgtgaacctgttcagaattttattctgttctgttggcctatttgtggcatgtacttttttcttttcttttttttttttaaatagcctaattgagttataattcacatgccataaaattcacctattagagtgtatagtgatttttactatatttgcagagttgagccaccattatcaaaatgtaattccagaacattttcaccaccccaaaaagaaatcccatattattagcagtcactacatgagaaccactaatttacaaatcttctttctttcttgctgaatttattgattctggacatttcatataaatggcatatactgtgtggccttttgtgtctggctccttttacctagcataatgttttcaaggttcatcgtgttgtagtatgtacccatacttcattcctttttatttttattcaatcacttattcattcattcattcattcgagatggagtctcgctctgtcacccacgctggagtacagtggtgtgatacgggctcactgcaacctctgcctcctgggttcaagcaattctcttgcctcagccttccgagtagctgggattacaggtgcctgccaccgcgcccagctaatttttagtacagacggggtttcaccatgttggccaggctggtctcaaacttctgaccttatgatctgcccacctcggtttcccaaagtgctggaattataggcgtgagccaccgtgcctggtcaacacttaattcttttttaaaaaaattgtggtcaaatatatattacataaaatttgccattttaacagttttaaagtatataattcagtggaattaattccattgataatgttttgcaagcatagctactatatttccaaaattttttcatcacctcaaatagaaactttgtacccattaagcggtaactccccatcttccagcccctggtaacctctaatctactgtccgtttctatgaatttgcctattttagatattttgtataagtggtcatataatatttgtccttttgtgcctgacttatttcatttagcatgttttcagggttcatccatgttattgcatgtatgagaacatcattcttcttttgtttgtttttggtgccagataatattctaatatatccgtgtggtataaggatataccacattttgtttattcatcagttgaggacatttgggttggtactatttgaccattatgaataatactgctgtgaacattcatgtacaggtttttgtgtgaacatatgttttaacttctgttggatcttagcagtagaattgctgggtcatatgttaacttcctgtttaatttttagaagaaccgccaaatttttccaaagcagctgcaccctttcagattgcctccagcaatatataagggttttggtttttccatgttcttggcaacacttactaatatgtctattttttattataggtattttagtgggtataaagtggtatctcattttgattttcagttccccagtgagtaataatattgaacatcttttcatgtgcttattgccatatgtctgtgtttcttggagaaaactctattcaaaatttgactatttttttaattgggttatttttctttttatggttgagttgtaagagttctttatatattctggttacaagtccagatatgtgttttgcaaatattttctcccattctgagttctctttccactttcttggtgtcttttgcagtgcaaaagttttacattttgatgaggtccaatttatcaatttttttttcttttgttgcttgtgcttttggcattatttctgagaaatcattgcctaatccaaaggtcatgaagatttgcacccatgttttcttctaagagttttttaattgtagcttttacatgtaggtgttttatccaaatgagttaatatttgtgatggcgtgaggcagcagtccaactttattcttttgcatgtcagtatccagttgtttcagcactatttgctgaaaagaatattccttccccattgaattgttttggcacctctgtggcattttattttttattttttatttttattttttgacagagtcctgctctgtcgccaggctggagtgcagtggcacaatctcggctcactgcaacctccaccttctgggctcaagtgatcctcccacctcaccttcctgagtagcttggaccacaggcatgtgccaccatgcccacctaatttttatatttttttgtagagacaggatttcgccattgtgccccagctgatctcgaactactggactcgagattagcatgcctcggcctcccacagtgctgggattacaggcatgagccaccgtgcccagcccctgtattgtgttttcatatgaaaactttgtcaaactctttaggtattgctgagaattttttttttataaatatgaaatagctactgtcacaacaggcagagaataaaagaacctcttattgtatctatttaaggtaaagagatatttagtaattaagatagttggtaattatttcaaagtgagatattattttagaagtcaattttcactgttctctactttcatttgtaagacatttttatttcttttttagaaattgaatctgtggcaagtaaaatggcttgaggtggtactactattgacaagccacttagagtgaactctggatctattccctgttgcaaaagtcaacacaggggttgacttttgtttagtccaagattatagtagtttatagtttagttctttaagcaaggaatatttttgtggcatctttcatcaatatgcatatggactatgacagcagttgcaaactaatcttggatttccactggcagcagttggaaactaattttggataatcacaatatccagcaacaataatatacagataatttggtgtctgattttaaaatgagtgtataaatggtgtgtggtacattgatagtatatgtttgtcttaaacagtgtagaataatgtaactccttaaataaattctgaagatagcattattcgagacatctctagaatattgtatactgaggcatgagctttgagactcatttgttggagcagagagtatttttttttttttttttttgagacggagtctcactctgttgcctacgctggagtgcagtggcacgatctcagctcactgcaagctctgcctcccaggttcactccattctcctgcctcagcctcccgagtagctgggactacaggtgcccgccaccacgcccagctaattgttttgtatttttagtagagatggggtttcaccgtgttagccaggatggtctccatctcctgacctcttgatctgcctgcctcagcctcccaaagtgctgggattaccagtgtgagccaccgcgcccagccaagagtatgttttgtatgtagatctgtttttttttacgttcattttaaacctatgtagtctcaagtatctgcacacaaattattcattaatagcaaaggggagaataataactttaaattagagaaacttggtagattaaccaagtgaccaaaattaacatcaatcagtattgggacaaactggcattgtatgcttcctaatatgatgcattgaaatagatacaactacacttttgtggtcttttttccaaaagtgtgtaagctgagtctaactgtgatgaaacatcagacacaccaaattgaggtacagtctataaactgtcctgtatttttaaataagtcagggtcaagaaagatgatgattgaggaatgttctagattaaaaaggatactaaagagatatgtaatcctggactggagaggaaaagactataaagtacattattggaacacatttaaaatttttttttaagacagtgtctcctgtcgcccagcatggagtgcagtggtgtgataatggctcactgtagccacaaactactgagctcaagtgatcctcacacctcagcctcccaaagtgccaggagtacaggtctgagccactgtgcctgtccctattggaacaattgatagaatttgaatatagaccatggaatgttaactttcttggtgttttttgttttttttttttttttttttttttttttttgagatggagtcttcgtctgtcacccaggctggagtgcagtggcatgatctcagctcactgcagcctctgcctcccaggttgaagtgattctctagcctcagcttcctgagtagctggaacaggcgcgtgccatcacgccctactaatttttgtatttttagtagaaatagggtttcaccatgtgggccaggctggtctcttaactcctgacctcaagtgatccacctgccttggcctcccaaagtgctgggattacaggcgtgagctactgcacctggccctcatttattttattttatttttatttattttttatttgagactgagtcttactctgtcatccaggctggagtgcagtggctctctgcaaactgtgcctcccgggttctagtgatactcccacctcagcctcccaatttgctgggactagaggcatgcaccatcacacctggctaatttttgtatttttttgtagaaaacggggtttcaccatgttggtcaggctggtctcgaactcctgacctgaagcggtccgctcacctcagcctcccaaagtgctgggattacaggcgtgggccactgcgcccggcccaactttcctgattttgataattgcactgtgattatgtaagagaatgcgaattttcttttcttttttgagatggagtgtccctcaggctggagtgcagtagcacgatctcggctcactgcaagctccacctcctgggtttcacaccattctcctgcctcggcctcctgagtagctgggactacaggcgcctgccaccacacccggctaattttttgtatttttagtagagacggggtttcaccatgttacccaggatggtctagatctcctgacctcatgatctgcctgccctggcctcccaaagtgctgggattacaggcgtgagccaccgcgcccggcagagaatgtctgttttcttaggaaatacatatgaaatgtttaggggtaatggagcatcatgtctccaacttactctttgttgtggaaaaaagtatatatatgcatgcccatatatatgtagagagatgatgataaagcagatggggcagaatataaaacttgtgctgaatctgggtaaaggttatgtgagatttccttgtgctattcttgcaagttttttgcaagtttttgaattataataagaagttagaaaagtataactgaattggtattaagactcttgacataggttgggcgtggtggcacacacctgtaatcccagcactttgggaggccgaggcaggcagatcaagaggtcaggagatggagaccattctggctaacatggtgaaaccccgtctctactaaaaatacaaaaaattatccgggcatggtggcgggcacttgtagtcccagctactcgggaggctgagtcaggagaacggtgtgaacccaggaggcagagcttgcagtgagctgagatcaggccactgcactccagcctgggcaacagagtgagactccatgtcaaaaaaaaaaaaaaaaaaacacacacacacacacaattagccgggtgtgtggtggcagttgcctgtaatcccagctactcaggaggctgaggcaggagaatcacttgaactggggaggcagaggttgcagtgagccgagaccacaccaatgcattccagcctgggctacagggcgagactccgtctcaaaaaaaaaaaaaaaaaaaaaaattcttgacccagctcaccagcatagttagtttacttttctgtgcttccttgcagaatagcttttaaaccaaaatgcttaattatgccttcaaattctgggattcttcatattgcagaagagcctacaataaggcttaaaagcaactgtgttttaacatcagtgggagatcaaggaaaatttcagagtttgcagtttggtaggaagactgaaaaactttgcatttgtactttaatagtgtggtttcatgatggtttttgaagaactgtaagttttaaaaatatcagacaaagccatgttcaaataaaatcattcttaaaaactgctgccatataggtattttcaaaaatataatttttttctatatgctttgttggtagagattatagttcaaattactgcatggcttttgaaatagctgggattatgcttgttttattatttgtggttcaaatataaaatttttaatgttaagcctgtttaagtactacttttctttcttaaatatttttctgactttaatagtattttttgcctttttttttaaagaggcctgggcaacatagtaagaccctgtataaaaaaaattagccaggcatggtggcatgtgcctgtaatttcagctatttgggaggctgaggtgggagaatcacttgagcctggcagattgaggctgcagtgagtcatgatggtgccactgcgctccagcctgggtgacacagcaagaccctgtctacaaaaaacaaaacaaaaacttaaaaaccagagaaggaaacaattacccataatcaataatcattcatttcagaagtaactgctgttaagagtattctctttctgtagtttcaaaaaatataatcggcatatacttgtatacaatttaaccatgctttattcacgtaacacatcatgcatatctacccacatcattaaaaattctttatcattattgtttttaaacttttaataatattccatcatatggtgtatcacaatttacttttttctgagttattttgaaggcaagtaactaacttatattggttataagatagggaagatacagaagatgaatattttaatctatgcagtttacaaacagaagtaattggacctctttttcttgttccttgatttctgttatcttttgagaaacattatttgtaagaaaagcttttaaaagttacattaccagcatttgttatagtaaaaaacggcggggcacagtggctcatgcctgtaatcccagcactttgggaggccgaggcgggtggatcacgaggtcaggagatcaagaccatcctggctaacatggtgaaaccccgtctgtactaaaaatacaaaaaaattagccgggcatggtggcgggcgcctgtagtcccagccacccaggaggctgaggcaggagaatggcatgaacctggaaggcagagcttgcagtgagccaagatcgtgccactgcactccagcctgggcgacagagcgaggctctgtctcaaaaaaaaaaaaagaaacctggaagtatgcttttttgtatgaaaaaggatcctacctaattcttaaatgttaagttgtttttttttttttcggttggcgggtacagggggagatagagtcttgctctgttgcccaggctggagtgcagtggttcactgcaacctccgccccccgggttcaagtgattctcttgccttagcctcccaagtagctgggattacaggcatgtgccaccacgtccagctaattttcgtatttttagtagagacgaggtttcaccatgttggccaggctggtctggaactcctcatctcaagtaatccactgtcctcggcctcccaaagtgctaagattacaggcatgagccactgtgccctgccttttttttgtctgagacaaggtcttgccctgttgtccaggctggagtgcagtggtgtaatcttagctcattgcaccttcgacctcctagggtcaaaggctcctcctgccacagtctccctagtagctgggactacaggcacacacgccccaatacccagctaatttttttttttttttttagtagagacggagccttgctatattgtccaagctcgtcttgaactcctgaccttaattaagcagccttcctgcctctgcctcccaaagtgctgaaattataggcatgagccaccacgcctagcttggaattttatttctaacatacatagttcacagatatctttctcaaattaaaaagttataaatttggctgggtatggtcacttgaggcaggaggattgcttgaggccaggtgttcgagaccagcctgggcaatatattgagactccacctgattctctgctttctctttcctttttctgatttctctgttctttgagggtaagatgatattctcagactacatacatctttcaatagtagccagcacagggctgggtacattcagtgaacaagtgaataaatgaatatacaaaatacaatcagaatcttagagaaggggaacccggtaggattgtaaacacatgcagagaaacacccatcataggagcaggctggcttcaagtctagaccctggtcatctcacagtgaactaatggtacttgaacggagccctgactcccatgccaagcaatgtgaagttgtatccttgactgtctcaggtaatacttagagaagaagagtgttatcaagaaagacaattgagaaacaacctatatgaccatacaggggattcagcaggtaaatggtggtgtagccaaacaatagaattctttgtagatctggctgggcgtgatgactcatgcctgtaatcccagcactttgggaggccgaggtgggtggatcacctgaggtcaggagtttgagaccagcctgagcaacataatgaaaccccatctccaccaaaaatacaaaattagctgggcgtggtggcacatgcctgtaatcccagctacttgggaggctgaggcaggagaattgcttgaacttgggagatggaggttgaagtgagccaagatcttgccactgcactctagcctgggcaacaagagcgaaactccgtctaaaacaaaaaaaaggaattctatatagatcttaaagatgagtttgtggccagtacagtggctcatgcctgtaagcccagcactttgggagtccaatgtggcagaactgcttgaggccaggagtttgagaccagcttgggcaatatagtgagacctcatctctacaaaaaaaatttttttaattagcttggtgtagttatgcatccctatagtcccagctatttggaggctgaggcaggaggatcacttaaccctaggggttcaaagctgtagtgagcaataatcatgcactgtactccagcctgggtgacagagtgagactctgtctcttaaaatatgtgtgtgtgtgcgcgcacgcgcacgtgcgtgcacatatatatattttttttttaagatttccacttggcagatatatgagtttagggattttgagattatatattttactccaaaagtatgtaagataatggccaggtgcagtagctcatgcctgtacttctagcactttgggaggctgagggaggaggatcatttgagcccaagaggttgaggctgcagtaagctatgattgtgccactgcactccagcctaagcaacagagtcctttctggaaaaaaaaaaaagtatgtaagataaatcatacttgaatttaaatctttaggcattctgtttttatggtgggtagcagacttaggacaaaaggcactgcttttaaggttaggaattataataatatattggttacagaaaactgaaagtgatacctcaattacaataagtatgaagctatgatttgaccgacaaatttctgagcattgtccataatatagtcctagttgtgtggatgttagtcttgcttgatttaaatgtcctggaattgcatctgtttttaggtcagttcttgaaattagtaattacctcacattaaaatgcttttattagtcatagaattaactgtttgaccagaaaacaaatatggatagttgaaggctgttcctttctttgagtctttttatagttctccacctattaaggattccttcttaacaaagcagactttatgttgatgtaaataagaggttcacccatgattgtgtataactaaattacaccttctctggtgctataacatcatcctgatttaggtatgtggtggtgtctcaaacttcataaatgaatacctgaaatatttatatattgcattcatctgaaaggaagctactagtaggcccactcataggattgttaacatctcttataatttcatgttttggcaggtaaacctagcctttaagcaacctggaaagaggctagaacaccaaggaattagaattgaatttgtaggtcaaattggtgagttttaaaatagtattatttctttttctttgataactgaatttgaagagggttggattttgcaccaaaataattgaattagagcttagctttgtagaaggaaggaattgattttgcataataaaagagaggatttactttataactatattaaattgtgtttctttgacttgtatgaaatgatatttgatatatcatttcatgatatatatgaaactaccagccttgaaaactaattcaagtaaattagttgacctactgaaattttcatctgcctgcatttttcaccatccttcttataattagcagcctcaccttcattcttcattttctaattacccatgccatttgtcttcctgatctagtgtgtgcctgtagccagactcacttgtgtcaacacacaattccatgtgagaaggaaaggtgtagtttcttcttgacttagatcaacttatgtacatttccatacatgattccagatgaatgcttgatttagtagggagttaaactatataaatctttctatactgaagattcagaagagaaaagaaaatatgtctttataatactgtctacataactaggcttaaaatctagctttctaagtttcagtgtacatttttaaagtatcagaattggaatgggtagatatttatatatctgttctgactgagagtgtacttacatgtctattctgactgagaggcaagttgtagtaattgatagttggttttagtctttttgtgttttgtaattttatgaaggtaatatatttgcctaactaaagcaaaatagaatttttgccttgtctaggggaagttcaaataattgctggtaatgtgtcaaatggcttcatattgggagagccccaactacatcaaaggaatgaactcatttttaaagaaattttcattgtgctatgccacttgaaatcttttatgcctacatgaagtataattataaaaaggataatggaattcagagcataggtctagtttattagagacaaactcaataattcttttggtaaaaatcgtttgtgtttgaagtagatgtctgggttttattgaaatggctattaaataattggtctttttgccttttaaaatttctcagaacttttcaatgacaagagtaatactcatgaatttgtaaacctagtgaaagaactagccttacctggagaactgactcagagcagaagttatgattttgaatttatgcaagttgaaaagccatatgaatcttacatcggtgccaatgtccgcttgaggtatgaatgtgtattataaactgtaaacagaatcaaaaccagaaagtaatgactactgttgatatcttatttgaacctctaattataattctgtattggaagatttaagatttttaaaaattctgtcacatactttggctaatgctgatttgaggtaatagagcgttctaacattatagagttagacaacattgttatgagacatttcagttatacacttccctggtatgaattgtcccttacgtacttcatttgtcatgtaaactgaatgaccttctaaatccactagtttcccagaaaatctcctttagtatatggttcagaagtaatctggagtaccagagaggctctgatacatctaaaatgacacaaatagtggatggcagaaaaggagtacgaacctagttttctaaactctcaattcagtgtcctttcccttcactaagtctgtatgcaggaagccagggatgcctcagagtccagggcatttcaggatattaatctgaatgcatcaggtccgagatcttgctttctctgtttaacttggcattatctatctggaactgggtttgacaacccaaatttcaaatagcagttccttaaagaagtgatctggagaggtttcttcaagtaggcttgatgacagccctccaaactcatctgtaaagtatttacactattcttaaaattgaactttgtattttttttcatgttgggggcattaaagaaaattggaactccttcgtgaagtaatgaagtaagttgatcccaaaggagttccagcaaggaggagaagcctgagttgcagttaatgtttgctgatttaaaacatgaaaatttatcacaggtgatttaactcatcgactctcttttaactttgtaggtattttcttaaagtgacaatagtgagaagactgacagatttggtaaaagagtatgatcttattgttcaccagcttgccacctatcctgatgttaacaactctattaagatggaagtgggcattgaagattgtctacatatagaatttgaatataataaatcaaagtaagtatcattcacagataagttgttcagagaaaattcaaaaattaacttttcaggtgtttgtcagttggtcaaagtaaggatagaattgacattaatctgatgttaacaaatcaacaggatctctgagctaaaagaaattttaggagtttggtctggtttccactcagtaaaggtgtcttttatgttctattcctgataaatctctgcttggccactttgtgtagaggatgtcaccatctcagaaggcagccagtccttctgaggatacaatttatcttactggcttgatattacctcatcctagccatctcttttcacatattttcacctttaccacttaatcactgttaatgtctccttgtatatcatttcttggggggagggggaaggtatatatgtttatatatgttgtatttttacaaaactggctcatattttgcttgtgtttaatgcctttttaaattttattatgggaaatttcaagcatatactaaaatatttgaacagtatactgaataatataatgaatcctcatgtacccattgcccagctccaacagttatcaacacacaatccagtttatctgtattcagctctcatactccccataggttatattgaagcaaattccagacatttaatttaacccataaaattatgtatcattttatcaattaaattatatatgtggaatttgcttcgatacaatctgtgggaagctgtatcaatatcattttatacatggactaagatgttctcagaaacattacttacatgaacaaaagattgccatttaaatgcccactggtattataacagttaaataaattatggtccagccatactgtggaatgctaaagaagggttaaaaagattgaggccgggtgcggtggctcacacctgtaatcccagcactttgggaggccaaggtgggcagagtttgatcacctgaggtcaggagtttgagaccagcatggtcaacatggagaaactccgtctccactgaaaatacaaaaattagatgggtgtggcggtgcatgcctgtaatcccagctacttgggaggctgagggaggagaattgcttgaacctgggaggtaaaggttgcagtgtgctgagatcacgccactgcagtccagcctgggtgacagagggagactccatctcaaaaaaaaaaacaaaaaaaaaagattgagacatatgtatttagttctccagaagcgtgtccatgatatattaagtgaaaaatttagccataaaaacagcatgcatagtactgtttcatttctgtaaaatactcatgtatttggatatgaatagaaaagagtctgcaatgatattctgttgttaacagtggttatctgtaaaggatgaaattatgtattgactttacatatctcttatttaaatgttatatgacaagcttgttttctgtgtctattcagaaaaaagttttaaaaagttatatatcattctaaatataactacaatactcttatatctaaaaatattagtaattccttaatatcttcatacacccagacagtattcacatttccctaattggctcacagatatctttcttttttcacatactttgttcaaatcaatatttaaactagggccacacattgcatttggttgtttgagccttaaattttttaatttataggtttcccttctattttttttattaaagtttgtttgttgaagaaatggatgtgccctgtattatccctttcataccccagtcttttgttacattatttttattggttgtcactcccaggtttatatcactgaatatgtaatacatatggacttcagaatcttaaaattatattgttgatgaaattatcaaatagtttaggacctgaaaccactgaagcttcccttcagactgacataatttttacacacacacacacacacacacacacacacacacacacacagttttttgtttgtttgagtctcactttgtcgcccaggctggagtgcaatggcgtgatctcggctcactgcaacctctgcctcctgggttcaagggattctcctgcctcagcctcctgagtagctgggattacaggtgcctgccactatgcctggctaatttttgtatttttagtggagacggggtttcaccatgttggtcaggctggtctcaaactcctgacctcatgatccacccgccttggcctcccaaagtgctgggattataggcatgagccaccgcgcccaacatatttttttttttttggagtcggaatctctgtcgtcccgtctggagtgcagtggcatgatctcggctcactgcaacctctacctcctgagttcaagcaattctcctgcctcagcctcctgagtagctgggatgacaggcatgtgccaccacgcccggctaatttttgtagttttagtagagatggggtttcaccatgttggctaggctggtcttgaactcctgacctcaggtgatctgcccgccttggtctcccaaagtgctgggattacaggcgtgcccggcctgacataatttatattaaccaactcttgagatacaattttgagagccaaacctgggaggatgctaaaaagtcctctggatattatagggattcctaagtttattaccacatcattacaaggtacgtgggagcgacctttggttattagctatcacaacagcagactcaacctatgtaggtaggtttcttttactttgtctttgtgggcagatgatttatgttagctgcactcttgtagaacttgagtaataatgacactaaactcttgtgtcttttaatgttgaaaatatcttcatacaccaaatatttcaagtattttttgtgtgtgtttgttttgagaaagagtctggctctgtcacccaggctggagtgcagtggcacaatcatgagtcactgcagcctcaatctcccaggctcaaattatcatctcacctcagcctcctgagtagctaggatcacaggcatgtgccactaattttgcaccacccagctaatttttagaagagattacatccccctatgttgcctaggctggtcttagactcctgggttcaagcaatcctgtcgccttgggcctcccaaagtactgggattataggtgtgagccactgagcccagccagaacagttaaccagggtaattattccctctgaggtagtcaagtaaaagtttgattccttatttgcatagtgaaatgatgaatacttttttgaaaaaaagaacactaaacaatatgaataatcaaaatggttgttgttggtttttgtttttggtgagccaaagttttatttattcatttgaagtattctctgatgacatcctggcctgagactccttgccatagttcttaattactgcacaactgcaaacaaccactttacggggtttcccccatctgtcagttttatagaggcttacccattccccagtttcttcttgtcatcaaccggggttcagcacaaagggcctccaccaacttaacatacatgggctcatcacaattagatgcaagcacacaaagatgagcttggtgcctgtctaaggctttggcagctttgtgaattccacatgctaggccatcatggatgagggtggtcttcagcacctcttgtaaagcagtagtaacgtcccttatacctccagcagcaatgccttcctcagccatggtggtgagtgaaactgaatcttgaatacacccaggccgccacctccatgcaactcagcagcggcaaggaaagagctcaaaatagtacttttttttttttttttttgagatggagtcttgctgtcacccaagctggagtgcagtggtgtgatttgcctcactgcagccttcacctgctgggttcaggcagtcctcccgcttcagcctcccaagtagcagggatcacaagcatgtgccaccatgcccagctaatttttgtatttttagtagagacagtttcgccatgttggccaggatggtcttgaactcctgacctcaagtgatccgcccaccccggccttccagagtgctaggattacaggcaagagccactgtgcccagcctcaaaatggcttaagtaattatactaaagatgtctatcaaagtcttttaggacatagttcactgtttttgcttgtttttaaactgatatttagtgagatatgttcttccccaataggtatcatttaaaggatgtgattgttggaaaaatttacttcttattagtaagaataaaaatacaacatatggagttacagctgatcaaaaaagagatcacaggaattggtaagttgaaaagagtatgtaaattaaaattctttgttttagttgacatttttaaaatcttaaaatattgtttaaacataatttgatatccacattgagtactaattttgctagttaatattgctggcagtaagttatttaatgtttttttaaattactttttgattgtccagaatttattttttataaaaaattaatttttgaataggtaataaattcacatggttcaaaaataaaatgtaaaagagtatacagtaaaaagtatcttatttctgtactctagctactcataggtaatatgtttattataagtttaaaaatcctcagtggagcaggtcaaaactcctgtgctgatcagtagtgggattgtgcctgtgaatagccactgcacttcagcttggacaacagagtgagaccattccaaaaaaaagaaaaacaaaaaccaaaactttccaattagttattatgtatacaagcaagtacctatgtataagacacacccctttttacttaaatggtggtgtataatgcatacttcgctttgccacttagtagtgcatcttagagaactttccataacaatgtgtagaatactttatctttttaatagttttccattttattgatatactaaaattgaaccagtctgctgtttgtggacatactggttgtttccggtcttttgctattacagataatgtcattttgcacgtgtgcaagataaaatcttagaagtggaattcatgggttaaacagcatatttgtttataattcttctgccctttttgtggcgaacagggtctcactatgttgcccaggctagtctcgaactcctgggctcaagctatcctcccacctctgcctcccaaagtgttatgattacaggcataagccattgcacctggccatttacaattttgatgcatgttatcagtaagtcctctttagggattatcccagtttgcattgctatcagcagtgaatgtaggagagtgcctcttttcccccatattctcatgagcacaatgctgtaaaaacttttagctcatttgatgggtaagggggagatactactacagtgtagttctgggatttttcttatggattctttttcccccactgctttattgaggtataattggcaaataaaaattgtatatattcaagatgtatgatggaatgtttacattatgaaatgattaccacagtcaagctaattaatatattccattatagttttaattttcagttttctttttttttttttttttgagacggagtctcgctctgtggcccaggcgggagtgcagtggcgcaatctcggctcactgcaagctccgcctccagggttcacgccattctcctgcctcagcctcccgagtagctgggactacaggcgcccaccatcacgcccggctaattttttttgtatttttagtagagacggggtttcaccgtgttagccaggatggtctcgatctcctgacctcgtgatccgcccgcctcagcctcccaaagtgctgggattacaagcgtgagccaccgcgcccggcctaattttcagttttcttattgaggatgaacatctcttcatatgaataaaaacaatttttattttctgtaagccattcatattctttgccccattatctattctttttcttacttatgtgtagaaactatatattagagaaatcaatccccctccaccttttttttttttgagacagggtctcacactgtcacccaggctggagtgcaatggtacaattatagctcactgcagccttgaactcctggacttgagcaatcctccaacctcagcgttgtgggtagctggggccacaggcacatgccaccacacccagctaattttttatttttttgtagagacagggtgtcactacgttgcccaggctggtttcaaactcctggactcagcgatcctcctgcctcagcatcccaaattgctgggtttacaggtgtgagccactgtgccctgaattcctttttctaatattaagggtagcaaaaatttccctcgtttgtcttgtttgtggtggttcatgccatgtagaagttattgatgtttatgtagtcagatttatcagtttttcattttatggcctctgggttttatgccatggttagaaaggtctttttcacactgaagttctaaaaataattttctgtgcttgattctactgaagtaatacattgtggtttagggattttgtttcatttttaaaatattaattcatttgaaatgtgttgtgatgtaagaggtgaggtatgtatcacctttacttttttccagatggctgaccagttgtcctgatatcttttattgtttcatccctgctttttgattttaatatataaatatataaacttactttctcctctaatattgttgggtgtttttttttttttggagacggcgtctccctctgtttccaggctggagtgcagtggcgtgatctcggctcactgcaacctctgcctccagggttcaagcaattctcctgcctcagcctcctgagtagctgggattataggcacacgccaacatgcctggctaatttttgtatttttagtagagacggggtttcaccgtgttgcctaggctggtctcgaactcctgagctcaggcagtctgcctgccttggcctctcaaagtgctgggattacaggcgtgagccactgtgcctggcctcatcgtcgggttttttgctgaaagtaattctaggcaacactttataagaatttatagtcagtattcataatttaaaacatctgtgatttcttttattattattattttatttttaaataaaattctcacccaaggcatgatctcaaggcaagaggtcctgagaacatgtacccccatatgtgatttcttaatctccatgtttctacttgctagtaaatttaagtgattttaaaatcacttcaaattctcctttgttgtttcaaacaacttcaaattctcctttgttgtttaaaatgtggccaggtgcggtcgctcacctgtaatcccactactttgggaggctgaagcgggcagatcacttgaacccaaggaattcaagaccagcctgggcatcatggtgaaaccccatctctatcccaaaaaatacaaaacttagccaggcatgatagtgcacgcctgtagtcccaactactctggaggcttaggtgggaagattgcttgagttcaggagtttgagaccagcctgggcaatatattgagaacccatctctacaaaaattgaaaataaaaaaacaggcatggtggtgcacacgtgtaatctcagctacttgggaggctgaggcagaaggattgcttaagcccaggaggttgaggctgcggcaagccatgattggaccactgcactctagcttgggtgatggagcgagacaccgtctctaaaaaaaaataatgtagtggaaaaataagaaggcataaggctagtaattatattctggaatatttaaattaatgttatttacattattgcactaggacccagtaccacaacagaaacagaaacaatcgccaaatatgaaataatggatggtgcaccagtaaaaggtaacacacttttcagttacttcttttgtatagtgcaaacatcagtgttcatggcagttttgtttgtatttatttagtgtgaaagtatctttgaattcttaaaccattcttacaatgatagcttttaaggtcatctttgtacagctgcaaagaagactgtaattatatttcctagtctgaaataaggtttaatttttcagtttcaatttaggatttactagagacagttatatgtatctattctctagttttgaatttgtaatattttcattgtcttctattatacaatagttcgtctttgtaaatgttttttctcctgaccacaaaatggagtatggctgagcattaattcctgtaggtttttggagtcattatagctctcaagaaaataagcagttccattactagattaatcttcagtatctgagacaatgaagccagtatttatcattttaaaatttatgtctgggttttcttcactatttgtgcttacatcacaaagccagtaccatttattaagtgccaagtgtagatgaggcaatgtaatcttaggtgctctaaaactctttgagctaggtggttgtgtcccttatgatgcatgtatgtgtactcttgtgttatgcaacattactttgtaaaattccagcagccaccagtttttatgtaaaattatgagttttatatctttcagcaaattggtgtgcatgagaaaattattatgtaaaaaatattcaggccgggtgtggtggctcatgcctgtaatcccaacattttgggaggctgaggtgggcagatcacttgaggtcaggagttcaagaccagcctggccaatatggtgaaaccccgtctctactgaaaatataaaaattagctgggtatggtggtgcacgtctgtcatcccagctacttgggaagctgaggcaggagaatcgcttgaacctgggaggcggaggttgcagtgagctgagatcatgccactgcactccagcctgggagacagagtgaaactccgtctcaaaaaaaaaaaaaaattcaggggccgggcgtggtggctcacgcctgtaatcccaccattttgggaggccaaagtgggtggattgcttgagcccaggagtttgagaccagtctgggcaacatggcaaaacccccatttctataaaaaatacaaaaattagccaggcatggtggcatgcacctatgatcccagctacctgggaggtgggaagctcacttgagcccaggaggcaaggttgcattgagccaagatggcactactgcattccagcctgaatgacagagggagatcctgcctcaaaaaaaagaaaaagaaaaagaaaaaaaaaagccaggcgcggtggctcacgcctgtaatcccagcactttgggaggccaaggtgggtggatcacctgaggtcaggagttcgagactggtcagcctggccaacatggtgaaacccagtctctactaaaaatacaaaaaaaatttgcagggcatggtggcaggtgcctgtaatcccagctactcgggaggctgaggcaggagaattggatgaacccaggaggtggaggttgcactgacccgagatcgcaccattgcactccggcctgggcgacagaccaagactccatctcaaaaaaaaaaaaaaaaaaaaaaagaatatgcaaagaattacccttaggaaaatagaagcaatgagaatctgaataacagtctttttggtaataaaagaatgtcatcattctgtccgtttttagctttgaatatatgagtaacaagtattcaataatttatacacatgattagaaattatggtaaacttcatgaaagaagataacaaaacaacttatagagcacttatctgttggcactgtttgagttttttaggtatattaacccatatagtccttacacattccttgtgaatactattgttattccccatttcacagatgaagaacttaaacaatgagtaagtgatttttccaaggtcacacaaccagtaagtggttgagatctgaagccaggtattctgactctagaacagtagttctcgtctaggggcaacttcacctcacaatgaatgtttggtgttgtctggagatatttttggctgttacatttggagagtactactggtatctagtgggtagaggccagggttgctgctaaacatcctacaaaggataggaccctccccacaacaaagaattattcagcccaaaatatcagtactactgaggatgaaccctggtctttgttattttgcatctcatgaggatgtgaagcattagtgtcaactctatagtgcttagtcctacctgttatgtgactatatttaatcatctttagaattaagtagaaattccttttctttcaggtgaatcaattccaataaggctatttttagcaggatatgacccaactccaacaatgagagatgtgaacaaaaaattttcagtaaggtactttttgaatttagtgcttgttgatgaggaagaccggaggtacttcaaacagcaggtatggtgccacttgggctggtattatgttctgcggcagatctaaaaatacctcgaaagcactcttctaagcttcactgtactgagcgagtgggagtttctaaataaataaaaacactgtgggtatgatagataaagaagtagaggagaatagaatcctatgatagatccctccccaatcattctgcagtactccagaatgagctataatttttcagggcttttagttttctcttacaagttcttttgtttttgttttttaataaaaacaatacctgctgcttatttagaaaaaaataaggcaataaagaacaaagaatgaagtaaaggtcagcagaatttccaccaccattgcaactaatgtgtgtatgtgtgtttacatcatattatggatattgcttttttttttttcttactgtttttaattttttgtagagacagagtctcactgtgttgcccgggctggtcttgaactcttgggcttaagcaatcctcctgccttggcctcccaaagtgctggaattataggcatgagccaccgtgcccagctgtattctttaatttgcatttttactcagtagtgtcttgaatatctttctcttaacaaatatacattattattattattattattactatttttattttttaagatggggatcttccaagcaatcctccagtcacagcctcttgagtagctgggaggtacaggcacgtaccactgtgccctgctgatttatcccttttaaacaattctgtcataatgtccatgagatgactgaattctaataatttttttatttgagacagagtctcgctacaggttaatttttgtattttcttttttgtagagacagggttttgccatgttggccaggctggtttcaaactcctggcctaaagtgatctgcctgccttggcctcccaaagtgctgggattacaggcgtgagccaccatgcccagcctctaatcctttttttttaagttttttttttgagacagagtctcgctctgttgcccaggctggagtgcagtggtgcgatctcagctcactgcaaccttcacctcccgggttcaagcagttcttccgcctcagcctcccgagtagctgggattataggtatgcaccaccacacccggctaatttttctatttttagtagagactgggtttcaccatgttgaccaggctggtctcgaactcctgacctcaggtgatccgcctgcctcagcctcccaaaatgctgggattacaggaatgagccaccgcgcccaaccgcctctaattctttgtttaatataaagtgttcattacaaacttgttctcatttgaaaatcaattaaaagcttttggtgaattttgaatgaagatagtaattagaatggtcttttgtattctgaatcagattaataaacatgtagttaaatgtcagttgagtgttcaaagctaagttagaaattaccctgtcctaagtactgtgaaaaatacaaaaactaccttttataaacatgatctgtcctccatgttctcacattgtagatatctgggaaaaagaaaaataatataaactaacagaatacttaaataatagcttgacagtaatttagaagagacaaaacctattccagtattgccatcctaatgttgtataattaaacatacatgatttataactttgaaataaattacatgatttttacaatttcaaaatcaattgcatatcatggcactattggaggtaagtctgttatttcccatgtgcactcatttggatgtttaaattctgatatgttggggaaaaaaaaaagcctataatgacttcatgaagcaaataattttaggaatttagaagagggaagttctcaggatggattggttagggtaagagttaggtagagaaatcgagatttgaagactggggaagatgtagggcgagtttatttggattgcattggaggcagagagtaactccatttggccgatgggggaaaatggtcaagggagggaagagaataatgttggtaaattggataaaggttatagaggggcatgaatacctgtttggagatttatcctggaggcactgagaactactaaagagcaatccaagcaatgtgctggaggattaacctgctagtgataataaaggattagatagaaagggctctgcctctcttgcctctgaggaagctgttttaatatctaagtgacaagaacttgaatttggatgagggcaatgaacaattaaaggatggatttggggaattctttaaagtaacaataggacttcttgacagattggattggtggtggtggaatgcatgggtgctggtgataggagcactagaggtagaaggggcagtcaagattagagctggaagaaagtggaaaagaagttggaaaagaggagggcttttgtagggaagaatttaattttattatggttaaaattgaagtggcaatcaatagagataaggcatcatatcaaacattaatttgttaatatcttgcatttgtttactaggagataattttatggagaaaagctcctgaaaaactgaggaaacagagaacaaactttcaccagcgatttgaatctccagaatcacaggcatctgccgaacagcctgaaatgtgaactgaacaggagaaaaaaagaaaagcaaaaaactcctgtaacccttgagattaagttcagcaggttaaagatggttgcagctggagggggcggaaaaaggccaaaactccatatatgttagtcttcctttatcttacagcgcagcatttattttatgatataatgaaatgttcgttcatgtatatacatttttaaaagtgctttctttgaaacactggaactttgttaagctgcctttttttttttaacttcctactttgatgataagcactcagatatatatcagcgtaaacatgaaaaattttcatgtgagtaggctggtatttgtaattttgctttctttctgcataatgttgattataaatcctctcttttcaggctaatgattacctcttattctctacatgcaaaaaattaaatattttgtgttcaaataaaattagaaaacctgagtggcctcttgtgtcctgcagagatttaaaacatggcatctcaatatttttgagaactacatttgtttttaacatatgtgtttgagaaaagcatatggagtgtttcaccgcaggcacttctgagtaccattccatggcttccagaattttatcctctttgaggtcttctgtgctatgaatattagatttctttccccaagggattatgtggcaggtcattatggccttcttttttttggccatattaagtaacagttttgctatattccagtagtaccgttgtgtgttttctgcaatgtggagttgacttagcttggcattttagatttgttaaaactattttttccataaatactttgaaacatatttatatatttcaatttaaggaatctttttgccatgtgtatgcaaatattattttcttcatacattcattttcttttcaggggaaaattttgggatgggggactcaggaggacctgtgaagcatgtagttatctagatctgggtaatttcatgtttattaaactcgaactttggctagttaaactcatattgaaacttcatctagtctcttaattttttaacactaaattcaagtcatttgttttaagtctctaaaaaagaagattgcagtcatccattcatatgcatggggtctgatcgcaaatacactaaatgtggagtgtaggaaccaaaatgaaacctgctgtatggaaactactttcacttatggttcattggtttttgtaccaatattttttatgcacttcagtgcaagtcttgtcagttaaccttactttatgagtaagctaaataacccaaattacatttctttaaacctgttttactactatggcactttgataaaatggtcaggaaccaactttactggcaaaagggtccatgtaccaccatgtgctggagcatctgttctacatgtggatatctatgaatggtaatgttttccttcatgtaagtgcctattcagagtttcagaattttaaaatgccaaatattttcatggtcatttgcatgtagtaagccagaaaatattcaaagagattttgaaaaccaattgtatttaaccagcctcaaattgtgcaaccatgatgtataataaagaatttgaaacagaaactgagcttgctgtttgcatgattaaaatagctctgttctcaaatctcttctcattgttagatttattgtcgaggataggattgttcaatagtttaggaagctgtaactgtgataatgaatttttataaatattactggtttcaattttaaatagatatataatgcttttaataggctggcttaaaactgtcatatacaggatgcctatccgttttgctcaagactttttgtagcataaccaatttgaaaaaaattcaaatttaatatttggtgatttcagtcaaaagtcagccagctaattagaagtcataaactgaaaaagaaatttgtgtctttaatgaagagttacaatgtctaatccattggttctcaaccctggctgcatatcagaatcaccttagaagcttttaaaataaccaggcccgggtcctactctgaccaataaaataagaatctcagagactgggccataagcattaaaaacaaaacaacctcaaaaaaatacctgtcatctcagccacttcaggagtctgaggcggaaggatcacctggaattcgagaccagcctggccaacaaaaatgagaccctatctctacaaaaaaattaacaatgagctgggcatggtggcatgcacctgtatttccagctatttaggaagctgagacaggaagatccctttgagaggtgaagccagctggacttctgagttgcgtggggacttggagaacttttctgtcttacaaggggattgtagaatgcaccaatcaacactctagctaggattgtaaaacgcactctggctagctggaggtttgtaaaatgtaccaatcagtgcttgtgaaaacgcaccaatcaggctgggcacagtggctcacgcctgtaatcccagcactttgggaggctgaggcgggcagatcacctgagttccaggagttcgagaccagcctgaccaacgtggagaaactccatctctaccaaaaatgcattagtcgggcgtggtggcacatgcctgtaatcccagctactagggaggctgaggcagaattgcttgaacccgggaggcagaggttgcagtgagccgagatcacaccaatgcactccagcctggctagaagtttgtaaaatggaccaaccagtgttctgtagaatggaccaatcagcaggacgtgggcggggacaaataagagaataaaagctggccaccccccagccagcagcggcaaccggctcgggtccccctccatactgtggaagctctgttctttcactcttcacgatacatcttgctgctgctcactctgggcctgtgccacatttaagagctgtaacactcaaggcgaaggtccacggctccgttaagtcagcgagaccgcaaacccactggaaggaaccaactctggacacaccttgagtacacgaatttgaaattacactgaggtgatcatgccactgcactgtagcttgggtgacagagacaccatgtctcaaaaatctacccagagttgggaaccactgatctaaaccattaaaatttttatttctgtcactaa

SEQ ID NO: 472 - DNA, 42645 bp, Homo sapiens
  source 1..42645: mol_type = genomic DNA; note = NC_000002.12:c21044073-21001429 APOB [organism=Homo sapiens] [GeneID=338] [chromosome=2]
attcccaccgggacctgcggggctgagtgcccttctcggttgctgccgctgaggagcccgcccagccagccagggccgcgaggccgaggccaggccgcagcccaggagccgccccaccgcagctggcgatggacccgccgaggcccgcgctgctggcgctgctggcgctgcctgcgctgctgctgctgctgctggcgggcgccagggccggtgagtgcgcggccgctctgcgggcgcagagggagcgggagggagccggcggcacgaggttggccggggcagcctgggcctaggccagagggagggcagccacagggtccagggcgagtggggggattggaccagctggcggcccctgcaggctcaggatggggggcgcgggatggaggggctgaggagggggtctccggagcctgcctccctcctgaaaggtgaaacctgtgccggtggtccccctgtcgggccctagcacccgctgggaagacgtgggaagctcacagatttctttctcctgtcttacagaagaggaaatgctggaaaatgtcagcctggtctgtccaagtaaggcatctgcgcatggggcgtggaagggcgcccagccccgtgcactctcctacacccgggtccctgagggcctcccactctacagggctgagatggcatcgtggtgtgccttgctctgaccccaggaagcaagttccctgagcctctgcccacacccaagggatgccaactctcttctacctggccttctgttctgtcccaaaagttcagcctgggggcgggggagggaagggattgtctctccgctggcctgtgcacactttgaagaaacatcactgtcctgtttatcagtgactagtcattgattcgaagcatgtgagggtgaggaaatactgactttaacctttgtgaagaaatcgaacctccacccccttcctatttacctgacccctgggggttaaaggaactggcctccaagcgcgaccctgtgtgctggagccgcggggcggacttctgatggggcagcaccgccatctagtggccgtctgtcatcactgcagctggactcaggacccagatgttctttttcttcaattgttcagaaaattcctctcaactacagtggaaacctccagaaattcttttctaggagtttgttaagttagttacgcttaatgcttaatgaactttgccttaagtatttggtagtcttagagtcacggaattacggcgtgttcaagctaaaaaagcattagagatagtactatttgcgtaatgttgtcatctcttaatttgccagagggtctctcatgcagattttctgagccccattacttgacacttgtcactcccttccctgtgcctcagatgagatattcaagacatgccagccaatttaaacattagcctcagcaaaaacataatggagaagtcaaatctataaaggaaaattaagtataaagtcaattaaaaaataatttgagttgaattaccatttttaattctctatgccactgcccctctctgcccagaattggctgtccttgggagagctatttctgctatgtggctgacgtatttctccccacgttagaagatgcgacccgattcaagcacctccggaagtacacatacaactatgaggctgagagttccagtggagtccctgggactgctgattcaagaagtgccaccaggatcaactgcaaggtatggaggatgcaggcaggagggacctagagcccacagctttcccccagccctgttccagcgggcgcccaacacgcgaccttcccggagggtgtgtactgagcaaacgcagaacatcccagaactgttgtaatctgatcaaagcactgggactttgcctctgtttgtaagtcagccacattgctgagatgtggtctgcccccaccaaatttcgcaagtcagaagtattttcccgttaacttcccagatgcaataggaatccatgatctagattagcagcagtgtgggtctgtagatttcagcgtgagagaggcccagtaggtgagctatgggaggcaggcaactcggaatcgcactgtgaaatgcagtttttataatttaagtcaaacagaatctgttgctgaaaaatgaatggaaagaagaaaaaaatataaacatacagtttgttctaaaataaaactttgcttattattgagactggttgtactcatgttacatacatgtggagcagatctacaggctgctattggggtttgggtggggaagagaagtcaagctgagcagtcacctttttttagagagtaccgtagctcttgtatgtgctgtccaatatggtagacatgagccacattgggctatttaaatggaatgaaattaaaaattcatattcgttgtcacattagctgcatttcaactgctcaacagccaccctggctactggctcccatattgaacagcacacatgtacaacatttctataaagttatttgaatagtgctggataataagtaggaatccgttgaaactccagctatatgcaaagctctaaataggccctaatagatataaccagttttttgggtgacattaaggagacatttgctgtggaaacgaaggatggccctcttcctgctttctgtttttcttcttcactttcactcctagtctgcagcgcttctatttaaccacagctctttataattaaagtgagtaactttagaaccaataaaaggacatcctccttcccatgcctaggggcaaacttaagaaatgtgttacccgggagggggaaaacgtcagcaataggactaagtctaggttggtgcacagagaacccaggaggcatgttgataaggcatgtggtgttgaggcgcaggcagtggtgttcccagcaccattccctttggtgctctgattagagattaagccctgggcttcaggggccacctctcattcttgatagacaacctcaatgctctgctaccctgaattctcaggttgagctggaggttccccagctctgcagcttcatcctgaagaccagccagtgcaccctgaaagaggtgtatggcttcaaccctgagggcaaagccttgctgaagaaaaccaagaactctgaggagtttgctgcagccatgtccaggtaagtcatgttgtacatgagcacacgcatgtgtgtgtgtccgctgaggtatgaacttgtgtgtttgcaccaggcacggatgtgactgtaagtatttgtattccgtatccatcgtggatcagggaattactgagttttcacaatcatcaaaaagagagaagcattagttaaccttccctagttaggttcctttaattatcattttcatgtgtttctaaaaatctcatgctttaaacttcttgagattataaaactgagatgctttgtttaaacaagtgaattcttatttaaagaactagtcaagactagtgcttggtggtctttggtgtggggtcccagaggcactggctgctgtggccggcacatggcggggcagggtctgttcaccgcagggcagaggagcaccaaggcttcggtggctccccctcctaggctggcattcagccactgcacgctgatcggccactgcagctgcatctctgctgactggtcagggcccatgtcgcacccattgtaaatattttcaacatcacccctgcctcatcctcaatcacagtttgtagggtcctaggtgtgtatgaatacaggcaggatagagttgttaacttggtagcatcagaaaactctgtctgtattagtctgttttcatgctgctgataaagacatacctgagactgggcaatttacaaaagaaaggtttattggactcacagttccacgtggctggggaggtctcacaatcatggcggaaggtgagggacagcaagtcacatcttatgtagatggtggctggcaaagagagcttgtgcagagaaactcctgtttttagaaccatcagatctcccgacacccatctgcaatcacgagaacagcacgggaaagacctgcccccatgattcaatcacctccccccgggtccctcccacaacacgtgggaattatgagagctacgagacgaaatttgggtggggacgcagagccaaaccatatcaccatccttgcccatttttcagttttgctaaacattagattcagatgccagtcctttcttgccaaaataggctgtgaggcttctttctttcctatgctttattttctccaagacttaactgtatatgagggagaggggtatggtggcaggaggaaagagtggtttattttttggtccttggtcttctccaaatacagaagagactcctgttcttgaaaaggagggctttccatgtttgcatcttcatgactttaactgtcttttttaaaaattgacatacaataattatacatatttattgagaacatagtgatattttgatacatgtaatgtatggtgatcagatcagagtaattagcatacccatcatctcaaacatttatcatttcttcgtgttgggaactttctgagagagtgtaggctgtgggagataagtccgtcaccttttcctcctgatgtaaccagagtggctgcagccaggtcctcagaaactcagagagtacccagtgggaaatccctaagaccaaagtcagcatgggcttcagccatggcctgacaccatacaaaagaatgactgtccaacaagtgtatgaaaataagctccaattcactggtagtcaagaaatgcgaattaatgtaacaacaagatatttatctgcttttacccatcatactgcaaaactggaaaacagtgatagcacctgttgctggcaggccagtgaggaaaagtgtgctgtcctgagctgctggtggaaacgagagccatcaggcaatatctactgtaatttaaaatacttaataccctttgacacagatattttagtctttgggactctagcccatgaaaataaaagcagtaatgtgtgaagataggcacataaggatgtttgttttggtattgtttgtgtggtttaaaaaaaatccagaaagagagagggcaaatgccatcaaatggggcaatgtgtgaataaattatatttagccatggaatggaatgttctgcatgcagcttttaaaaaaatctgttagagctgtaccaagtgactcagaaggatttttgtgaagtataattaagtgagaaaaacaagataaaagtatgcataatacaatgccacttgtataaaacaaacaatggcaaaatctttgtatgactctgtttgcactcacccatgtttacagaggattgtatgagtgtgcagaaacaaatggaacaaccactcgggtgtccgtatggggaggatgggcaaagagactgatatgggtggagaacagagcagggctggatgagccaagcaaaaaaagttaaaacacagctggacctggtggctcatgcctgtagtcccagcactttgggaggccgaggagggagaatcacctgaggtcaggagtttgagaccagcctggccaacatggtgaaaactgtctctactaaaaatacaaaaattagctgggtgtgatggcacatgccagtagtcctagctactccggaggctgaggcaggagaatcacttgatcccaggaggtggaggttgcagtgagctgaggttgcgccattgcactccagcccgggcgaccgagcgagactccatttcaaaaaaagaaaaagaaaaaagaaaaaaagaaaaaaaaagaatcaccaaaacttatgtatatgtgcatacttttttgaaaatgtatgtctatgtgtagctatattctatatttacaaataaatgatgtcagaagaacaattggttaaaaaaatatgagaaaagaaacttcagtgccacccagcttacttccagcaagttgtaatggagaaggacatttccgtgaccatcctctctctgggacaggtatgagctcaagctggccattccagaagggaagcaggttttcctttacccggagaaagatgaacctacttacatcctgaacatcaagaggggcatcatttctgccctcctggttcccccagagacagaagaagccaagcaagtgttgtttctggtgaggatttagaaagctgatagcagtggcccttgaaactcatcttcatgtgttagagaccagtcctaccatatacaaagcagatcactgagtcagctccatgactagttacataggaagccctggattggcgtgaaatactggtgcccgaggttcctcctgccccttaggctcactgacagatcatcccaagcaggcttatcaggttgggtctaattttaaaacagtcattgaggagtcctggccaccccacccctgcttttgtttgatgcttcacctgtgtttgctgggttatggtgtacacagtaaatcctgtgtgtattttaaacaccaaaaataatgggatctgttgctggtctcttttacgaatttcaggtttcactgtgagacagaattcatttcacctcagtcccatgagcacttttgtgtgttctaatttctctacgacaccataatgggagaagacaccgatgcaacctgcggaggcctttctgcagacccacctttaactggttttctctctcccaacttgggctggccaggcactagcaagaccacactctgcataggaagaaaaagaaagtccctcccaaagctagattccttctgctttttctttcacgatccccaccccatccctcccaagtacccaaggatgttgcccgtgttgaatacatgtggttgcatcttcttcctccataggataccgtgtatggaaactgctccactcactttaccgtcaagacgaggaagggcaatgtggcaacagaaatatccactgaaagagacctggggcagtgtgatcgcttcaagcccatccgcacaggcatcagcccacttgctctcatcaaaggcatggtaagtcccatgtcagcactgtcgtgcacagcaaggagcatcctcttattaatacaattccagaacttttgagctagtgggcacctttgaggacagcctgccctggctgttttttatacagactagagataggaccctgagcaggcacgggaaggtctgcccaggcttcacggcctgggatcagttgagccaaggcttgagtcaggctcctccctcccagcccagagctctgtctttcctcctgtccttctgtcactggcaccaaactgcctctaatctcatcacttgagagtaatgactactcacctctgagaaggttccggggatggatgtagggcagcaaaaccaccttctgttcttttctgcacaaggactccttgtgccagctccaagcctctggcctttgaagaagtcccaagacctgtgttctccccctctccctcatcccatgaagtggagtgacttagagtgctccagcttcttgtccttccacccccagtaccaccctgaccaaacatggccccactgccaccggcctggagcaccctctcctctctgttaactggggccatggagcaccatattacctgagcctgcctgacccctgcaacatcttccctgatatgagccccagcctgtctcagtgaacatgaataacttgggcaatcactgtcatgctgggcgctgttcctggtcattgtccttagggttgaaaacagggagtctgatgaccatgagtgccacagtcagaagaggataatgcactggcttaggggtcttttctgagcatctgctgtttgctcaaccccactctgggcagcaccaaggaagggacagtggcagatgaaccatggaccttcccctcaggatgcttccagtctaatgcaggagccaggtcaataaagtatacgtggtatactcaataaggtgataagctgaacagtgcagacaagaagtcctgggcctgaccaggaaggagaaagaattattcatgtagctcagcgggcaacatttcatggaagatgtggagcaggaacccaaaaaatgcaaagaatatgtaaatgaaagagacatgtaagaatgggcttttgggcaaagaaaagttactgagcaggtgtgtgaggggctatgtggtgggatgggcatgtggaggatacaaagtttagacattgtccagtgagggtggaaaaagaggagtctacagcttgactcagctttggggatgccgacttgttgcaccccctggtctaaatgtcaagtacccagttatcttctttctctgagtttatctagtggtacaggactcctgctcccttctaccttgaaggtaaatgcttttaacagaagatacagggactgatcaaaatgctcgtctccaatctctttcatagacccgccccttgtcaactctgatcagcagcagccagtcctgtcagtacacactggacgctaagaggaagcatgtggcagaagccatctgcaaggagcaacacctcttcctgcctttctcctacaagtaggtcatgtgatgcacccctgatttgtcatttaatgggtcagtgtgaactgaacacttctcaagtgctctgttccaggcaaacctgtgcctgggagggaggaatggagagggataaaatgccgcccctccctgtccccctttttaagcgaacaggccatttggcagaaaagtcctaggcatgcaaaacaatccaagaccaacaaaagatatctaagacccattctttaagggctgtagatccagaaaacctgaggatcactgcagggtaccctggttagaaaaggtttcatggaagatttgggatactgactggaaacttgtgtatccaaatccactttgaaaactgataatcaatgaatatatattgagtaactgccatattcttggctctatgttgtggaagatacgaaagaattttgagacattgcactagttcctacctctggccactccagactagtggagagtataaggcacgcatgtctttttgatgggaggataactagcgtgaccaggaagaggtggatgttattcattcagggccaacaatggctggatttacccatgctttgaaagatgggcaggacttgggtagatgcagagacagggaaaaccttcaacatggaaagaatagtatgttctggccatccgtgacatggtgtgcttccttggttaccaggaataagtatgggatggtagcacaagtgacacagactttgaaacttgaagacacaccaaagatcaacagccgcttctttggtgaaggtaagagtttctgtccacatagttgctggaaaatctactcaagatgtgcctatcatggcttagccacttgctgagccctgttaaatgtctgctgactaacaagtgatacagacactggtgttctggctacctctagtgagaaagcaaactcatttcatgatgtcaagttgcaatggcataaaggaaaagaagttcccaaagctacttaggcatttgtaaatagaaaactggaatcctaagtttaacatgacatatttgatagaactgacatcacccatcctgtgataagatccagagctgtcccagacgaggtggaccaagtgggagagaaccttcagagtctggccagatagtaacctcaggagtcagtctttagaggtagaaggaactctaacaatctcaagtccaacccttacccagtattgtattgtatttatatctgtccaaattccttcttgtacattacctcattgtcctttttgctcatagcaacctgtgatgtcaggtggtagagatgtgattttatacctattctacagaggagacagtgacacagagaggcttagagtttgatgtagtcaaggccgcagaatattagaggggggaaaataagtgccaggttgtaatctaagccaggactattctcattacaccacatttccatgatgacttttacctctcttcctggcataggtcacagtaggtggtggagaggatacaaaagtgtctcccctccccacaagctgctggtagacccaattagaagaaatggtgataagcacccatgtgcctggtcccagttgtaaccatgtcaacagtagcacctcctcaccaattatttcaagctaagggtaacctgatgatagactcagacaagtctggattccactttagctctacctcttagaccctgagagctcttgggaaacctaagttgctcatctctgggtcacacttcctcatctctgggtctcatctctttgtctcatctctgggactcagagctgagatccagggatgagcaatttacatggcccaaaaactctgtgggtctcagaagcagggctgaatttatcattaaattgaacaataatgccaccccacagggataggatgatgagtcagtgaaaacaagtcaatcacctatggcagagccagatctagcaggcattgaatacaggatagtttctttcccttttcccctgtgctgatactccacaatttccagcttccagtagacaaagatatggttgagatgaagaaagctagagttcctttgacactttccatcttccaggtactaagaagatgggcctcgcatttgagagcaccaaatccacatcacctccaaagcaggccgaagctgttttgaagactctccaggaactgaaaaaactaaccatctctgagcaaaatatccagagagctaatctcttcaataagctggttactgagctgagaggcctcagtgatgaagcagtcacatctctcttgccacagctgattgaggtgtccaggtatctaatggttacagctcaactttttataaaactgatggtaactgactgaactttcaaaccttggccaaatggagaatctcagggaccatttggatatcaatccagttaatcaattagtcaatcagttcatgattgctggatagagaactatcagctgctgcgctgagttccatgaaacacacacgcgcatactgtgttcaaggcagctatgtatttgtgtgttaaaacagaaggagaatagttcccacattttgatgggtaacttttaattcctaggtctattgcaggtgctctccagaagcttataggctggtggagagagaactcagacgaaaaatataatatgatttctctacccttcaaggcactggctttaagtgctatgaaggtgagagaagggactgaggccaggaatgagacccagctaatgttggccaggcatattctgtgtgctggccaaaggactgtgataacagtcttcttgttgctacagatccacagtcccctcttggaacttttctcgattgggcttcttctgtgggtaatattcctaaggaaagcatcatggttctgagctccaagttgggttttgaagttagatttgaatagtgaatgaggtgattaagggctctcctggcagaggacacaccatgagcaatattttatgtgccctgaaggtggtctgtataactttatccatgtctttcttctcagccccatcactttacaagccttggttcagtgtggacagcctcagtgctccactcacatcctccagtggctgaaacgtgtgcatgccaacccccttctgatagatgtggtcacctacctggtggccctgatccccgagccctcagcacagcagctgcgagagatcttcaacatggcgagggatcagcgcagccgagccaccttgtatgcgctgagccacgcggtcaacaagtgagtttccacactgtatttctcctcctaggagcagaggaacatcttgcacctctgtgcatctctgtattaaaactgaacccctccttccactttcaaactctgctccttactcttgtgttttttcttgatcatttttggggtaatgacttgaaataagaaatcagcaaacacaaattgaatttttaaaaatattttctctacattatattataaaagtttttgaacatagcaaagttgacagaatttcacagggaaaacccctagaaaaccagctatctcctactatttaagtgttattatatttgctttatcacatatacatccatccattaattcatcttattttctgaagcatttcaaagtaaattgcaaacatcaacacactttcccctaagtattacagcttgcatattattaacttcagttcaatattagttagcagttttttcctctgaatttttttgtttgtttgttttgtttttttttgttgttgttgtttttttgagatggtctcactgtgtcacccaggctggagtgcagtgatgcagtcacggctcactgaagcctcaaattcctgggctgaagtgatcctcccacctcagcctcctgagtagctgggaccacaggtgcatgctaccatgccctggctaatttttgtattcttggtagatacagggtttcaccatgttgctcaggctagcaggtttttcctttgatgaaattttttggctttttcttttttacatttttatataaatttatgtggaacaagtgtaattttgttacatgaatagattgtgcagtagttaagtcagggctttcagggtatccatcacccagacaacatatagtgtacccactaagtaatttctcaccatccatctccctccacttccacaccttctgagtctcaattgtctatcattccacacactatgtccttgtgtgcacattatttcactcccacttataaatgacaacacgcaatatttgtctttctgtgactgtcctgtttcacttaagacaatgacctccagttccatccatgttgctgcaaatgacatgattttattctttttatggccgaatagtattttattgcctatacatttcacatttttaatccaatcgtccattgatagacacttaggttgattccatgtctttgctattgtgaatagtgctgtgataaacatatgggtgcaggtttcctttggatataatgatttcttttcctttaggtatatacccagtaatgggattgttggatttattggtagttctatttttagttctttgagaaatctctgtattgttttccatagtggttgtacttatttacaatcccatcaacagtgattaactgtttccttttctctgtatcctcaccaacaactgttattttttgtcttttgaataatggccctcctgactcttgtaagatgttatctcattgtggttttaatttacatttctctaatgattagtaatgttatgcattttttcatatgcctattgccatttgtatgtcttcttttgaaaaaaatgtctattcatgtcctttgcctactttttaatgggattatttgggggatttttttgttgagttgtttgaattgcttgtacattccggatattagtaccccattggatgaatagtttgcaaatattttctcccattctgcaggttaccaccctgttgattatttgttttactgtgcagaaactttttactttaattaagttctatttgtctattttttgtttttgttgtctttgcctttgaggtcttattcacgaattctttgtctaggccaatgtccagagaagttttccctaggttttcttcttgcatttttatagtctcaggtcttatatttaagtctttgatccatcttgagttgatttttttatatggtgacagataggagtccagttttattcttctgcatatggcaatccatctttcccagcaccacttattgaaaagggtgtcctttccctagtgtatgtttttgtcaattttgtcaaagatccgttgactgtaagtatgtgactttatttctgggttcagtattctgttccattgatctatgtgtctatttttatgccagtaccatgctgtttagattactatagccttgttgtataatctgaagtcaggtaatgtgatgcctccagctatgttctttttgcttaaaattgcttcagctattcaggctctttttggattccatatgaattttataattattttttctaattcacaagtttgggttttaagacaaacctaactggggttaccaagtcctgactctcttctcttattctgtagctatcataagacaaaccctacagggacccaggagctgctggacattgctaattacctgatggaacagattcaagatgactgcactggggatgaagattacacctatttgattctgcgggtaatctcagtcttttatatgacatacatcatttcagaagcacttttcctggacaccttttacttccctctcctgcaccctgatgggttcttgtttcttttcttcaatgcaggtcattggaaatatgggccaaaccatggagcagttaactccagaactcaagtcttcaatcctgaaatgtgtccaaagtacaaagccatcactgatgatccagaaagctgccatccaggctctgcggaaaatggagcctaaagacaaggtaaagtccacaagaagaggtctgaaagtgaaagtttattaacaaggatttggaaggtactaggggaatgagactctagatttcatctactgactttattctgctgtttctttcctttccttccttccttccttccttccttcctccctccctccctttcttctttccttccttccttccttctttcgagatggaatctcactctattgcccaggctggagtgcagtggcatgatctcggctcactgcaacttctgcctcctgggttcaagcaattctctctgcctcagcctcctgagtaactgggattacaggcatgtgccattacacccagctaatttttgtattttttagtagagatggagttttgccatgttggccaggctggtcttgagctcctgacctcaggtgatccgcctgcctcagccttgcaaagtgctgggattacaggcgtgagccactgcacctggcctctactgttttctaattgcaaatttcaacaagcctattgacttgactgcctagcagtatgtgacgtgagagaaatacttgactttgctgctatgtcaacatgcagaacgtgagatgtttttgcttcctaccgtccacctaccagattgaccatccctctcatcatggaaaaacatgcttaattttcccccaataagcttaggctaggatagccaacttggccccctcttaggtgcaaagactccagaactttggaaactaccctatttattagccccaaactcttactaccccttctcatctttatcctcacattaaaataacttacgttaaaacaacttgattttcacttagtggtggatctccaaacaaatcacaacttggccataatttatgtgttttaatggaattgaattcaacaggcattccacaggctttttctgggaacccttacttgatagtgctctaggaaacactggcaagaagattcaataccagcatttgaagaacgattacagagaaattagacctgtgcttaagaaagagctagcagacaatgccagtgtttgccaggcatgttctgtgttctgaccacaggacagtgataaccatctcctcttttgactgcaggaccaggaggttcttcttcagactttccttgatgatgcttctccgggagataagcgactggctgcctatcttatgttgatgaggagtccttcacaggcagatattaacaaaattgtccaaattctaccatgggaacagaatgagcaagtgaagaactttgtggcttcccatattgccaatatcttgaactcagaagaattggatatccaagagtaagtaagagctattcaccccatataccactgagggccctgagctggaattccaaccctaggttttggcatagccactgtctgcccttgcttctgaaacaaacacttgtgcaaatgtgtagcagatctagacccaaagacttagggtcaatgaaatcaagacattttggtagtgattggaaatccatatttacttggggtgcaagagtcaaaggataataacatggtgtgtcagctcaaaatatacttcttcttatctagtctgaaaaagttagtgaaagaagctctgaaagaatctcaacttccaactgtcatggacttcagaaaattctctcggaactatcaactctacaaatctgtttctcttccatcacttgacccagcctcagccaaaatagaagggaatcttatatttgatccaaataactaccttcctaaagaaagcatgctgaaaactaccctcactgcctttggatttgcttcagctgacctcatcgaggtaagtgtgaagagtttgaggttctctagcccattttgtacagcatcataaacagagagtccctgggagccaggagctacccagaggaaaactaagaaccaccaggcacttcctaccatgattctgaggctttcttctttccctccttccccgccttcctctctccccgctaggggtcacctgaagcatgacttcttaacattaatagaaatgcaggcctggcgaggtggctcactcctgtaatcccagcactttgggaggccgaggcgggtggatcatgaggtcaggatatcgacaccatcctggctaacacggtgaaagcccatctctactaaaaatacaaaaaattagccgggcgtggtggcaggcacctgtagtcccagctacttgggaggatgaggcaggagaatggcgtgaacccaggaggctgagcttgcagtgagccgagagattgcgccactgcgctccagcctgggcgacagagcaagactccatctcaaaaaaaaaaaaaaaaaaaaaaattgaaatgcaaatgtctcgtctttaagtcccaaagccaaggaagcatatgtgctgcctagtcagatctgcttcaaatctcaaatcactcccaactctgaatcctttgttgaattatttgtcctatctgaaccttagctgcctcttctagaaaaaagcaagtaataaggtcaagattctagtgagattttaataaagcagctcctgtgaaatgctaaggtcagctcctggcctgtggtattcaaatacttgtttagataaatggacatcaagagtggggactactaggctggcatacaacaaagaaacctgatgccattttcttgtctgattttctttctcagattggcttggaaggaaaaggctttgagccaacattggaagctctttttgggaagcaaggatttttcccagacagtgtcaacaaagctttgtactgggttaatggtcaagttcctgatggtgtctctaaggtcttagtggaccactttggctataccaaagatgataaacatgagcaggtgtgtatttgtgaagtatcttcttaaggaaagctttgggtctcaatgcaaaaacaattcttttctaagcatggaagtcctcaaaatactatctaactgaagggataactatggtttttatcaaccagacctgctggggtaagggccagtatcctctgcagttaaagatctcctgaattcagtgtgcccagaaaccagactcacaataagtactctaggataacaagagtatgaactctgggctgggtgtggtggttcatgcctgtaatcccagcactttgggaggccaaggtgggcagatcacaaggtcaggaatttgagaccagcctggccaacatactgaaaccccgtctctactaaaaatacaaaaaaactagctgggcatggtagtgggtgcctgtaatcctagctactcgggaggctgagacaggagaattgcttgaacccgggaggtggaggttgcagtgagccgagatcacgccgttacactccagcccgggtgacagtgtgagactgtatcttaaaaaaaaaaaaagtatgaactctgggcatagatttaattctaacttccctgtcttgaagctgtgcgcacttggggaagttggttgatattatgtgtatctgtttctgtctgtatcccagactactaataacagtccaaacctcacaaggttatttaaagacaatgaaataaggcatctaaaatgccaagcacagtgcctgatgctggcattggttgttcaataagcagacactattacgagttctaaattaatattttcattattattaactgctgtctttggctctcactcccatcagtgcactagcaaatgagaccaaacttccactttgaagctagcaatgagcccccatttaaggagggaaataggttgtatgatctggagcttattcttgaattttttgctacccaaagtgtggtctggtcagaaatacagcttctcatgcttcacccacaatctactgaatcagaagcgcattttagcaagacctcatgtgacttgtatgcacattcaactttgcagagcaaggcagtaatttacccctccaggctcactgttgagcacgagctccatcttctaatttcctgacccccacttgaggccgaggatctttgatctgctttgagtctgtcagtttcacattttttttttcccaatgcctgggcatccatctctgagattcttcttctctctgagaagaacttgtctaggatcaagtgtttttcaaacttctggtgaatttatataacagctacattttcttaagaaacaccttgtagtcttcactggtcaaagaagagaaggctaagcagggaacgggtgggggatagaggatcttctaatcttgaggatcctggcatactggagaatagggacccctcctctcatcccaccacatcttactatgtctacagattttttaattaagaatagctttaggagtgccactatccctgacaagaccttagttctttaatctctgcttagaggaattagcctggacttcagtgtctccctgttcctcacctggagcattttttaggcccatcctggctgcatcagacaggtcccacattgggaactgaaaggtgtttgacattgctgacatctcactggccattttattactaaactctcaggatatggtaaatggaataatgctcagtgttgagaagctgattaaagatttgaaatccaaagaagtcccggaagccagagcctacctccgcatcttgggagaggagcttggttttgccagtctccatgacctccagctcctgggaaagctgcttctgatgggtgcccgcactctgcaggggatcccccagatggtaagtcagcaggccccactgggggcccatgagaccagacgttggtttttttttagatcgcccagactcccttacgatcccagctgcacaagcccgaaaagatgcttgtactttcttcagagatggaggtttgccttgaatttcactgaagatgactcttggatcacatggaaatgttaacatttagaaattaagctattcataatgttagctgtatttttaagagcattaatttattcatctggaaaacaatgttcggtataccttcctctacctttgctgaaggtccttttatttttatttttatttttttaattttttgagatggagtcttgctcccaggctggagtgcagtgatacaatctcggctcactgcaactctgccttccgggttcaagcaattctcctgcctcagcctcccaagtagctgggactgtggacgtgcaccagcatgcccggctaatttgtgtatctttagtagagacaagcctgttgacaaccatgtcaggctggtttcgaactcctgacctcaagtgatcctccagcctgggcctcccacagtgctggaataacaggtgtgagccactgcacctgacctgaaggtccttttaagattgaaatgatacaatgattataaaagaaagtatttggcaaactataattcactatctaaatatgctataatttttattattaattcataaaaggaaatatataaatgtactcctatggcttgattaaaaaaatgttgactttaagaaaacaggtctcaagctattttattgaaatattatttaaaaaataaaacccaatgcaaattgatatgtacatcatctcaataggcctttggtttcaaaaaattgattttatcataatataatacatttcaagtacaccttcacttacagtcagactccagaacaccagaattaagccatggcatatatgatacttaaagtccataaagctctgaggcccagcaatattcttaagagccttctgagtccacttgaaaatgacatgatatctatctagtgaaatttcttatatcctgattcactgaaaacggtaaaaacatcagtttgatctttatttatcaaactattcagctcatcaaaatatgctagtccttcctttccagataaagaggaattactctccaatgtatgggaggttgtaattaacaaaaccgactttaaaaagacttacttttatttgctctcccttgttgggtctacagattggagaggtcatcaggaagggctcaaagaatgacttttttcttcactacatcttcatggagaatgcctttgaactccccactggagctggattacagttgcaaatatcttcatctggagtcattgctcccggagccaaggctggagtaaaactggaagtagccaacgtaagattctgtttgccttttgatttcttaggttattactttcttccagggtgcatttcttgttaaaacatatttaaaaatgtgtttccacttcaagacaaaatgcttcatcattgtaatcacctcattatttttttatgaaaaacttcaagcttccaccagaatgcactacctcactagctccagtagtggtatggccataagacaagaactcagttctctcaacaaatgagtattcctatcatctttttaatctggttttgcctcacgttaactcaggtgctttctagttctgggtagtatactccaactctagagaactgagaactcgctttccttcttccaaacaaatcccagtaatgtttccaaaggtctgagttatccaggaaatctttgcccggaggtgagaaagggtggttgatctgactgacaggggactgaagtatttaatgaatctgaataggttgttttctgacttatagatgcaggctgaactggtggcaaaaccctccgtgtctgtggagtttgtgacaaatatgggcatcatcattccggacttcgctaggagtggggtccagatgaacaccaacttcttccacgagtcgggtctggaggctcatgttgccctaaaagctgggaagctgaagtttatcattccttccccaaagagaccagtcaagctgctcagtggagggtaattctttcagccaagtctgcctagccagtttgaaagagagaacagagaatgtacctgcagaattttgccaggctaaacagttgattgagatcattcaggtcctgaggaagcaggagaggagtagaaaggaaagattccgggttacctattttaattctagcctagacttactacataactacataattacctttcttctacttttcacattttactaaactgtcctttatctttctgctttgagacttattaagacctactgcttaattagtttttattaagttgtgattttttgttatctatttgttttgagaatgaagaaacaatagctctggagagatcatctttggaaaattaatattttcccccccaaaaaatacctaagaacatattgatttgaggtagctaggtaggtaaagcatgaaactcctaacctcgtgataatggaatacagcctcttttggagagttccattttaagtggcaccctcaaccattgatttgccttagttttcatattttagacacattcatgtgttcattcaaaaataatatttaattggccagccacggtggttcatgcctgtaatcctagcactttgggagccccaggtggatggatcgcttgagccctggtgtttggataccagcctgggcaacatggcaaaaccccatctctacaaaaaaaattaaataaataacaaaattagccagtcgtggtggcacatgcctgtagctccagctactcagaaggctgagatgggaggatcaactgagcccaagagttcaagccttcagtgaaccatgcttgcaccactgcactccagcctgggagacagagcaagatcctgtctcacaaaaaacaaaaaatagtatatttaattgcctaatatataccacgtatgttgagtgagacacacaaggtccctgacctttgaacgcttacattttataagggagacacacaattaagcaagcagtaatcatagagtaagggctaagttatagaaagtattagagtaccatgaaattttatatcatgtagcctgtgctagtcagggaatgcattctgaagcaagtgtacttgacctgataactgaggactgtgtcagagtcatttaggcaaaggagaaaggagtgagtgttccaggcaaaaggaaaagcatgtaatggcctgaaggtaaaggaatatggttcaaggaactggaagaagtgcagaatggtaaggggctcagagatgatggggagaggtaggcaggggagagagcatgcccagctgcgaaagccatcctaaggagtttggactcttttgaaggcacaggagttgaaaaggggagcagaaataagataggggtgatgttttagaagaaatactctgactctagtgtggaagatgggtgagaaggaggcacagctggacacgaagagaccattggacatctcttacgatcctatgtggctaagagctgataatggcctgcagtggagaaaagccaggtatagaaaggagtgagcagattctacaactttctaagaggcagaatcataagtactgggtgattaactgggtatggggacaaggcaaaagaaagaagaaaagaggaaggaggcgcccttcattttaataagaactacagtgggagagcttctggtttcaaggaaagtgacaaattcagttttggatgtgctgtatttgatgtcctcctatgaaacaaccagtttagaaatctagctgtcaaatagacctatggatctgagcccagtaaagaggcttgggctccacatatggatttgggaatcattagtatacagaggttgttgtggttaaacagcaactggtatagagtgagacatgagagatgaggacagaaatatggagaagacaaacatataaaggaagaaggggaataaccagcaatgagttagaagaagtgaccagagaagcagaaggagaaccaaagccataaaaggtcacagaagccaaagagcagccacaggggagatcaccccatgggtaggcgaaagctggcattaggactccagcacatcagcaaagcttggtcttgtggcacccccaacttggagaaacaatacttggaggaaaatgtgctatttcaaagaaagcatccttagaaaaaaccaggccaatgttgaactttcttacatgtactaagtttttaagtacacacttggaaggaaggtgccatcatctcttcagatgtgagaggctccagcgtcttagtctggtcatgagtgcgcaactctatggaaggcttctgggaggtcaaggaagatgaaacctaaatatgcccattggatgtaggagcaaggagggcattagagacattgatgaaagcattttcaggagatggagtgagcagtcagagcacattgggaggaagtagagactgcaaaggcagacaactcttgatggtgaggaagatgagaaagcaagaaaagaaagaaaggagcataggggaggggcacaggggaagagacttgagcgtgcttaatgcaggtggaaggaagcaggtagagagtaggagatttcatatgaaagagacagtttctcttgccctgcattgtaggaaggaaggggcacactgaagttcagccccagtgatcagctatttaacatctctgagcctctgcttctgtaaaatgagaaccataagcctactgttgtggggattacaggtaacagatggaaagaactcagccagaagcttcagagtcactctcatggcttgtcatgttgatgttctttctaatattatttgtttctcagtaaattaaatagttagagataggtgtggactgagggaagacaggaggataagggggtatttgcaccctgagaatttgtgatgtccattttgattcatgacttggcaataactcaggtatttttgttcttcaccagcaacacattacatttggtctctaccaccaaaacggaggtgatcccacctctcattgagaacaggcagtcctggtcagtttgcaagcaagtctttcctggcctgaattactgcacctcaggcgcttactccaacgccagctccacagactccgcctcctactatccgctgaccggggacaccaggttagagatgctcagtgcctgacccagcattttctcaccttccacatcatggccacctagcatggcacaggaaaaaatactctgtgttgtaagaccctgtcactagccttctgggtttgcaccatctttgggtatttaaagcagggtcctctggccaacacattgggtgtcaccttttgcttccttgtgcatgggatgggatcacagcacagatcccaatttgctcctaattcagtgtccatgtttctgagcctccagacccatcgctatgagcttcctggagcccaccaatgtgcttgaagccttcaccgtacttaggtggctccctgtcttcagcccccaagttccagtgcttgttctcagctttgctgaaacaaccagccaactcctgctctgcttgtccaaagtcttgggaatcctggtgtctgcccttgccttgggttcttgtaggactgagggatcaaaaagatcatcttagttaagggcaagagacaatgttaaaataaggaccatatttttgttgcatttgaggctgaattgttttgggaacataatcaccatccttgaaagctctaacattatgcactgtcttcattgtaatgtctttagattagagctggaactgaggcctacaggagagattgagcagtattctgtcagcgcaacctatgagctccagagagaggacagagccttggtggataccctgaagtttgtaactcaagcagaaggtgagtattcaaaacacagctgcctcatctctgctcgcagtctcaggttcagaattcatgaggagaagacatgtaatttaacctatttaacaaataggttaactgagtacccactaagcggcaggcctattctaagacctgggttaactgagtacccaataagcggcaggcctattctaagacctggggctagaacagtgaacaatggagtctctgccttcatggaagttacagtgaacaaccaaacaagttaatatttggaatatcagataagtactgaggaggaaaacagagcgtagactggtctatggagggctaggagtaggagggaggaagaagggcagggaaagcagtgcatttggaataataagggaaagtctccctggtaaagtgagcataaggagacctatcagaaataagaggagaagccgtgtggtaagactgttaacaggcagagggaccagcaagtgcaaaggccctgaggctgacacactactaccatgtttcaaggaaaggaaggaagacagtatggctggagcagaaagaccagggagaaaagaggtagaagatgaggacagagagatatggagaggtgaaggaaggataatctcataggccatggtaagaactttggctttttctatgaattaaacgaaagccattggggagtcctcatgatttgatttatgtttatgttgagaaaagactatgggcagacaagggcagagaaactaatatgtaggttatcacaataatccaggcaggaatcagtgttgttttggatcagggcaatggcagaagagatatgagaaggggatggattctggccatattttgaagattaggctgacaagatttgctgatacagtggatgttgagtgtaagaggaaaaggggaatgaagacaaacctaaggtttttggcccgggcaactgaaaaatggaacttccatttattgagatggaaagggctactggaggagcaggttttagggaatgggagaaatttaggtgttcactttggaaaaaaaattatatagggatagcgaggagcaggttttagggaatggggcacatttaggtgttcactttggaaaaatttttatatagggatagcatatcacagaattaaactaggaagaaaatcccatgatagaaagcactggaggagcagggcacgctggggaaatagtgtttggtaaacattgttttacgaaggatataaaatggaccagcctatggattgaaggacgcccgggaatcttgttacaaagaaagggggagttggggagatggagcccagggcaagggcagcaaggaaccaggacaggcatcttgggtagaaagtaatatagagatgtcgtgtcttcctggcccagaagggctgcgagcctttgctgttccacaaacaagctaagtgctccccatttcagggcctttgcattcctgaccttctgcctggaatgtgctcctcccagaactcagcgtggctccaacctcttttcattctggtctctgcccacatgtgcccttatcagagagaatttctctgaccaccaagtatgaaataacacttcttctatccctttcttttatccttgtatccagttttactcttcttcataacattcattaccatctgacatgagcaagttacttgtttattgcctgtacacctcccccactagaaggtaagccccatgaaagcaaggattccccagtaccaagagcagtgcccagcacacaataggctcataacaggcaatccataaagacttgcatacatgaacacaactgagtttaaaattatcagtaaatgagacccattaaaaaattttaatgagaaaaaaaaaattcagtaaaatcctgaactgtgtttttgtttaagcacattgattccttggagtttctctaccttttcctctctttccttccaaaacatagcttctttatttatttatttatttatttgtttgtttatttatttatttatttatttatttattttttgagatggagtctcgctcttttgcccaggctgcagtgcagtggtgccatctcggctcactgcaagccccgcctcccgggttcatgccattctcctgcctcagcctcctgagtagctgggactacaggcacccaccaacgcgcccggctaattttttgtatttttagtagagacggggtttcaccatgttagccagaatggtcttgatctcctgacctcatgatctgcccgccttggcctcccaaagtgctgggattacaggtgtgagccaccgcacccggcccaaaacatagcttcttaccacacatctcttgattctcttatacactcgtccaggtgcgaagcagactgaggctaccatgacattcaaatataatcggcagagtatgaccttgtccagtgaagtccaaattccggattttgatgttgacctcggaacaatcctcagagttaatgatgaatctactgagggcaaaacgtcttacagactcaccctggacattcagaacaagaaaattactgaggtcgccctcatgggccacctaaggtaaagaaggccgagggtcatctgacctgcactgcaggcctgggtggttcttttcattattcctcttccacttcatacctgaccaagccatgttctcccctagtctacaatcagagtggcagagagagccctcaacaattttttttttttttgagatggagtctcactctgtcaccaggctggagtgcagtggcacaatctcggctcactgcaacctccgcctcccgagttcaagtgattctcctgcttaagcctcccaaggagctggaactataggtgcatgccaccacacccagctaatttttatatttttagtagagacagggtttcaccatattgaccaggatggtctcgatctcctgacctcgtgatccacctgccttggcctcccaaagtgctgggattacaggtgtaagccactgcacccggccaagctctcaacattttaaccctctgcgcatgtccagttggattttcctaccatttatcaggcacttactattcatgtatcaagcacagtgctgggtgctttaaagaaattatctcggtcctcacaataaactgcgaggtcactgtgagttttcctgtttcatggataaggaaatggtagctcagaggggttaaatcatttggtcaaaatcacagagctagtaaatagcagagcaggattcaaacagttttcaaaaaacttctctttctcctaaacctgtttgcaaagtccttaatttgtgctgaatgttggctttagaagttgatgagtttgatctgtggctgtttctctgaaccatccttgtatctggttttgatcaccacaaatggaacttctgtttaatcctgcatatctccattgaaaggacaaaatcattggtgccaactgattttctttaccatagttgtgacacaaaggaagaaagaaaaatcaagggtgttatttccataccccgtttgcaagcagaagccagaagtgagatcctcgcccactggtcgcctgccaaactgcttctccaaatggactcatctgctacagcttatggctccacagtttccaagagggtggcatggcattatggtatgtgtctcttcccctgtgtgagcacttccaaagtaatgcaggtgttgagacctgtggttacaggctgaactagtaccattcacaactatttcctacgtattttcagatgaagagaagattgaatttgaatggaacacaggcaccaatgtagataccaaaaaaatgacttccaatttccctgtggatctctccgattatcctaagagcttgcatatgtatgctaatagactcctggatcacagagtccctcaaacagacatgactttccggcacgtgggttccaaattaatagttgtaagtatgagtctgccagtcaataaatacatggatataagtgctaattacatcctcaactctgagctaggtgcaggaaggtttccaaagatgtataaggcatgcttccttccccccagggaattcttggggagaaaaaaaaactttcacaagtgtgtagttacccagttacacaaagctgaatgtgatacatatcaaagagatgctactaagtagaacagttctttgcctagtggtatcaaaggaagcttcaggacaccagctaggaggctgactatgttagacattccttttataaatatggacagtgatcagtgactggcaacgaagattcataattttctgttatttatttttaactttcagtgcattgtccagcttaataattaacttgtcaaatcggtatttttgcctaatgttcattgctctttgaggctcatccaagcccattaccttaaaaatctcctgtcattttgtaggcaatgagctcatggcttcagaaggcatctgggagtcttccttatacccagactttgcaagaccacctcaatagcctgaaggagttcaacctccagaacatgggattgccagacttccacatcccagaaaacctcttcttaaaaaggtaaaagaagaaagcagcaaggcttcttgaaccatgcaaagtaaatgaaagattttacatagcatgatttagacatttttttaaatttttaaaggaaataatttaagcattttaaggagattaataactatagcacaaacactgtggcatctttgcattagtaaacatgagaacaccaaccctgtcaggaagaatctaagaaagtcattagaggattctggtactttcaccctaagatattttattcagtacaacctgttataagcaaattctccctctgactgtgaagaattcagaatggctagaggcgttattgactacaggcttgctgttaagctagagagagtcagaacagccattgagcactaaatggaggcagcattctgagaaaatactttaacccaggcttactgacttccatacctatgttctttccacaaatcaagttgtctcaattcagtttagcaaatttgtatcaagtatcccctatgtgcaaaatgctagactaggtacagtgagaagatagaaactgggtaaggtatagccttttctttcaagaagataccatggagacatcaacaaatgagaaataattaattatataagcaaaattatgacatgctctttgagaaaggtgcaagggactatgtaactgtaagaatgagacaaattggctatgacttaggtgggatggtaatgataaggagtggcccttagaagagctttgtcaggatttgagtgtttgacaggtggaggtaaaagcaaaggggtccaggcataggagtagcacaaagaaaagtgcagagtggctttgggaatggggcaagtacaatattgttgtgaaggtcagaggcagagaactttgaatgactgatgtctgactgtggggatgttatctttgttgttcatttcagcgatggccgggtcaaatataccttgaacaagaacagtttgaaaattgagattcctttgccttttggtggcaaatcctccagagatctaaagatgttagagactgttaggacaccagccctccacttcaagtctgtgggattccatctgccatctcgagagttccaagtccctacttttaccattcccaagttgtatcaactgcaagtgcctctcctgggtgttctagacctctccacgaatgtctacagcaacttgtacaactggtccgcctcctacagtggtggcaacaccagcacagaccatttcagccttcgggctcgttaccacatgaaggctgactctgtggttgacctgctttcctacaatgtgcaaggtgagctatgctcaggtaaagggtgcaccgggctagttcatggcaggctctaagaggagagcctcctccagggaggaaaggactttggctttctagcagataatcttccttgctacttggaagtcttttattttattcaacaaatagaaatatttattaaacatatcacgtgtattaaatattctagtaggcagtaacagaaagtagacagataagccagcaattataattcagtgtgagaggtgctatgataaagtgtagtatataagtataaggtagagtggaagcactcaacaagggaacctaaacaaagcctgtggtggtcaggcaaggcttcctggaggaatgccttttgctatcagattttatctttgcattacagatggaggagtctattgcacaattggcccagaaaaatggggctttattattgaaagactttcaacatagagattgctctggaaatgtactgcttaatttaaccaatgtcttttcatttttatgttaggatctggagaaacaacatatgaccacaagaatacgttcacactatcatgtgatgggtctctacgccacaaatttctagattcgaatatcaaattcagtcatgtagaaaaacttggaaacaacccagtctcaaaaggtttactaatattcgatgcatctagttcctggggaccacagatgtctgcttcagttcatttggactccaaaaagaaacagcatttgtttgtcaaagaagtcaagattgatgggcagttcagagtctcttcgttctatgctaaaggcacatatggcctgtcttgtcagagggatcctaacactggccggctcaatggagagtccaacctgaggtttaactcctcctacctccaaggcaccaaccagataacaggaagatatgaagatggaaccctctccctcacctccacctctgatctgcaaagtggcatcattaaaaatactgcttccctaaagtatgagaactacgagctgactttaaaatctgacaccaatgggaagtataagaactttgccacttctaacaagatggatatgaccttctctaagcaaaatgcactgctgcgttctgaatatcaggctgattacgagtcattgaggttcttcagcctgctttctggatcactaaattcccatggtcttgagttaaatgctgacatcttaggcactgacaaaattaatagtggtgctcacaaggcgacactaaggattggccaagatggaatatctaccagtgcaacgaccaacttgaagtgtagtctcctggtgctggagaatgagctgaatgcagagcttggcctctctggggcatctatgaaattaacaacaaatggccgcttcagggaacacaatgcaaaattcagtctggatgggaaagccgccctcacagagctatcactgggaagtgcttatcaggccatgattctgggtgtcgacagcaaaaacattttcaacttcaaggtcagtcaagaaggacttaagctctcaaatgacatgatgggctcatatgctgaaatgaaatttgaccacacaaacagtctgaacattgcaggcttatcactggacttctcttcaaaacttgacaacatttacagctctgacaagttttataagcaaactgttaatttacagctacagccctattctctggtaactactttaaacagtgacctgaaatacaatgctctggatctcaccaacaatgggaaactacggctagaacccctgaagctgcatgtggctggtaacctaaaaggagcctaccaaaataatgaaataaaacacatctatgccatctcttctgctgccttatcagcaagctataaagcagacactgttgctaaggttcagggtgtggagtttagccatcggctcaacacagacatcgctgggctggcttcagccattgacatgagcacaaactataattcagactcactgcatttcagcaatgtcttccgttctgtaatggccccgtttaccatgaccatcgatgcacatacaaatggcaatgggaaactcgctctctggggagaacatactgggcagctgtatagcaaattcctgttgaaagcagaacctctggcatttactttctctcatgattacaaaggctccacaagtcatcatctcgtgtctaggaaaagcatcagtgcagctcttgaacacaaagtcagtgccctgcttactccagctgagcagacaggcacctggaaactcaagacccaatttaacaacaatgaatacagccaggacttggatgcttacaacactaaagataaaattggcgtggagcttactggacgaactctggctgacctaactctactagactccccaattaaagtgccacttttactcagtgagcccatcaatatcattgatgctttagagatgagagatgccgttgagaagccccaagaatttacaattgttgcttttgtaaagtatgataaaaaccaagatgttcactccattaacctcccattttttgagaccttgcaagaatattttgagaggaatcgacaaaccattatagttgtactggaaaacgtacagagaaacctgaagcacatcaatattgatcaatttgtaagaaaatacagagcagccctgggaaaactcccacagcaagctaatgattatctgaattcattcaattgggagagacaagtttcacatgccaaggagaaactgactgctctcacaaaaaagtatagaattacagaaaatgatatacaaattgcattagatgatgccaaaatcaactttaatgaaaaactatctcaactgcagacatatatgatacaatttgatcagtatattaaagatagttatgatttacatgatttgaaaatagctattgctaatattattgatgaaatcattgaaaaattaaaaagtcttgatgagcactatcatatccgtgtaaatttagtaaaaacaatccatgatctacatttgtttattgaaaatattgattttaacaaaagtggaagtagtactgcatcctggattcaaaatgtggatactaagtaccaaatcagaatccagatacaagaaaaactgcagcagcttaagagacacatacagaatatagacatccagcacctagctggaaagttaaaacaacacattgaggctattgatgttagagtgcttttagatcaattgggaactacaatttcatttgaaagaataaatgacattcttgagcatgtcaaacactttgttataaatcttattggggattttgaagtagctgagaaaatcaatgccttcagagccaaagtccatgagttaatcgagaggtatgaagtagaccaacaaatccaggttttaatggataaattagtagagttggcccaccaatacaagttgaaggagactattcagaagctaagcaatgtcctacaacaagttaagataaaagattactttgagaaattggttggatttattgatgatgctgtcaagaagcttaatgaattatcttttaaaacattcattgaagatgttaacaaattccttgacatgttgataaagaaattaaagtcatttgattaccaccagtttgtagatgaaaccaatgacaaaatccgtgaggtgactcagagactcaatggtgaaattcaggctctggaactaccacaaaaagctgaagcattaaaactgtttttagaggaaaccaaggccacagttgcagtgtatctggaaagcctacaggacaccaaaataaccttaatcatcaattggttacaggaggctttaagttcagcatctttggctcacatgaaggccaaattccgagagaccctagaagatacacgagaccgaatgtatcaaatggacattcagcaggaacttcaacgatacctgtctctggtaggccaggtttatagcacacttgtcacctacatttctgattggtggactcttgctgctaagaaccttactgactttgcagagcaatattctatccaagattgggctaaacgtatgaaagcattggtagagcaagggttcactgttcctgaaatcaagaccatccttgggaccatgcctgcctttgaagtcagtcttcaggctcttcagaaagctaccttccagacacctgattttatagtccccctaacagatttgaggattccatcagttcagataaacttcaaagacttaaaaaatataaaaatcccatccaggttttccacaccagaatttaccatccttaacaccttccacattccttcctttacaattgactttgtagaaatgaaagtaaagatcatcagaaccattgaccagatgctgaacagtgagctgcagtggcccgttccagatatatatctcagggatctgaaggtggaggacattcctctagcgagaatcaccctgccagacttccgtttaccagaaatcgcaattccagaattcataatcccaactctcaaccttaatgattttcaagttcctgaccttcacataccagaattccagcttccccacatctcacacacaattgaagtacctacttttggcaagctatacagtattctgaaaatccaatctcctcttttcacattagatgcaaatgctgacatagggaatggaaccacctcagcaaacgaagcaggtatcgcagcttccatcactgccaaaggagagtccaaattagaagttctcaattttgattttcaagcaaatgcacaactctcaaaccctaagattaatccgctggctctgaaggagtcagtgaagttctccagcaagtacctgagaacggagcatgggagtgaaatgctgttttttggaaatgctattgagggaaaatcaaacacagtggcaagtttacacacagaaaaaaatacactggagcttagtaatggagtgattgtcaagataaacaatcagcttaccctggatagcaacactaaatacttccacaaattgaacatccccaaactggacttctctagtcaggctgacctgcgcaacgagatcaagacactgttgaaagctggccacatagcatggacttcttctggaaaagggtcatggaaatgggcctgccccagattctcagatgagggaacacatgaatcacaaattagtttcaccatagaaggacccctcacttcctttggactgtccaataagatcaatagcaaacacctaagagtaaaccaaaacttggtttatgaatctggctccctcaacttttctaaacttgaaattcaatcacaagtcgattcccagcatgtgggccacagtgttctaactgctaaaggcatggcactgtttggagaagggaaggcagagtttactgggaggcatgatgctcatttaaatggaaaggttattggaactttgaaaaattctcttttcttttcagcccagccatttgagatcacggcatccacaaacaatgaagggaatttgaaagttcgttttccattaaggttaacagggaagatagacttcctgaataactatgcactgtttctgagtcccagtgcccagcaagcaagttggcaagtaagtgctaggttcaatcagtataagtacaaccaaaatttctctgctggaaacaacgagaacattatggaggcccatgtaggaataaatggagaagcaaatctggatttcttaaacattcctttaacaattcctgaaatgcgtctaccttacacaataatcacaactcctccactgaaagatttctctctatgggaaaaaacaggcttgaaggaattcttgaaaacgacaaagcaatcatttgatttaagtgtaaaagctcagtataagaaaaacaaacacaggcattccatcacaaatcctttggctgtgctttgtgagtttatcagtcagagcatcaaatcctttgacaggcattttgaaaaaaacagaaacaatgcattagattttgtcaccaaatcctataatgaaacaaaaattaagtttgataagtacaaagctgaaaaatctcacgacgagctccccaggacctttcaaattcctggatacactgttccagttgtcaatgttgaagtgtctccattcaccatagagatgtcggcattcggctatgtgttcccaaaagcagtcagcatgcctagtttctccatcctaggttctgacgtccgtgtgccttcatacacattaatcctgccatcattagagctgccagtccttcatgtccctagaaatctcaagctttctcttccagatttcaaggaattgtgtaccataagccatatttttattcctgccatgggcaatattacctatgatttctcctttaaatcaagtgtcatcacactgaataccaatgctgaactttttaaccagtcagatattgttgctcatctcctttcttcatcttcatctgtcattgatgcactgcagtacaaattagagggcaccacaagattgacaagaaaaaggggattgaagttagccacagctctgtctctgagcaacaaatttgtggagggtagtcataacagtactgtgagcttaaccacgaaaaatatggaagtgtcagtggcaacaaccacaaaagcccaaattccaattttgagaatgaatttcaagcaagaacttaatggaaataccaagtcaaaacctactgtctcttcctccatggaatttaagtatgatttcaattcttcaatgctgtactctaccgctaaaggagcagttgaccacaagcttagcttggaaagcctcacctcttacttttccattgagtcatctaccaaaggagatgtcaagggttcggttctttctcgggaatattcaggaactattgctagtgaggccaacacttacttgaattccaagagcacacggtcttcagtgaagctgcagggcacttccaaaattgatgatatctggaaccttgaagtaaaagaaaattttgctggagaagccacactccaacgcatatattccctctgggagcacagtacgaaaaaccacttacagctagagggcctctttttcaccaacggagaacatacaagcaaagccaccctggaactctctccatggcaaatgtcagctcttgttcaggtccatgcaagtcagcccagttccttccatgatttccctgaccttggccaggaagtggccctgaatgctaacactaagaaccagaagatcagatggaaaaatgaagtccggattcattctgggtctttccagagccaggtcgagctttccaatgaccaagaaaaggcacaccttgacattgcaggatccttagaaggacacctaaggttcctcaaaaatatcatcctaccagtctatgacaagagcttatgggatttcctaaagctggatgtaaccaccagcattggtaggagacagcatcttcgtgtttcaactgcctttgtgtacaccaaaaaccccaatggctattcattctccatccctgtaaaagttttggctgataaattcattattcctgggctgaaactaaatgatctaaattcagttcttgtcatgcctacgttccatgtcccatttacagatcttcaggttccatcgtgcaaacttgacttcagagaaatacaaatctataagaagctgagaacttcatcatttgccctcaacctaccaacactccccgaggtaaaattccctgaagttgatgtgttaacaaaatattctcaaccagaagactccttgattcccttttttgagataaccgtgcctgaatctcagttaactgtgtcccagttcacgcttccaaaaagtgtttcagatggcattgctgctttggatctaaatgcagtagccaacaagatcgcagactttgagttgcccaccatcatcgtgcctgagcagaccattgagattccctccattaagttctctgtacctgctggaattgtcattccttcctttcaagcactgactgcacgctttgaggtagactctcccgtgtataatgccacttggagtgccagtttgaaaaacaaagcagattatgttgaaacagtcctggattccacatgcagctcaaccgtacagttcctagaatatgaactaaatggtaagaaatatcctgcctcctctcctagatactgtatattttcaatgagagttatgagtaaataattatgtatttagttgtgagtagatgtacaattactcaatgtcacaaaattttaagtaagaaaagagatacatgtataccctacacgtaaaaaccaaactgtagaaaatctagtgtcattcaagacaaacagctttaaagaaaatggatttttctgtaattattttaggactaacaatgtcttttaactatttattttaaaataagtgtgagctgtacattgcatattttaaacacaagtgaaatatctggttaggatagaattctcccagttttcacaatgaaaacatcaacgtcctactgttatgaatctaataaaatacaaaatctctcctatacagttttgggaacacacaaaatcgaagatggtacgttagcctctaagactaaaggaacatttgcacaccgtgacttcagtgcagaatatgaagaagatggcaaatatgaaggacttcagtatggagcttttattgaattgaaaccttataccttttgaaaactcattgtgattttcttcatctccatacccctttcgtgatagctcatctgtttttctgctttcagggaatgggaaggaaaagcgcacctcaatatcaaaagcccagcgttcaccgatctccatctgcgctaccagaaagacaagaaaggcatctccacctcagcagcctccccagccgtaggcaccgtgggcatggatatggatgaagatgacgacttttctaaatggaacttctactacagccctcaggtaaataccacctaatgagtgacacgcccccaagagcgagtggagaattggggcagatacatttaattcaggaccaaatattcagagattccccaaactaggtgaaagacaggcggtaagcaacttcttctctgaggaaatattctctagaaagtattacaatgagtccttgattgattttaatgtttagatgcacacatgacatcccatcagcactattatttattaattctgggcaaatccaggaagatgagggttatacctcatcatctaaatcataggcaagctcagccataggcagggtatatttttcagagaggactggtttctgtagtatttaaaactttaaaattcttccccacaatagaattgctagatgagatacatcaaattcctctcatgtcatttacaagctctgccagggccaaatcaagggtgacattaccagaggagaagaccaaacatggttctatgactgttactaaaagtttgtcatgggcttggagaatgcgtactgatgttgggattctgggtctctgcagggtgggctccaacttgccttttttgctatttcttcttttcctatctgtcatttcctgactcttcttctctctcctcttctttctcttccccccactcctcttccagttttcagtcctaggaaggctttaattttaagtgtcacaatgtaaatgacaaacagcaagcgtttttgttaaatcctttctggggcatgtgataaagagaaattaacaacagtagacttatttaaccataaaacaaacacatgaactgacatatgaaagataaatccctttcagtatatgaaagattctctgatctttatttttaactgctaatgaagttttagtgtactatattgtgtaattggagtaattgaaaacatgttatttttttttttctctctgtttagtcctctccagataaaaaactcaccatattcaaaactgagttgagggtccgggaatctgatgaggaaactcagatcaaagttaattgggaagaagaggcagcttctggcttgctaacctctctgaaagacaacgtgcccaaggccacaggggtcctttatgattatgtcaacaagtaccactgggaacacacagggctcaccctgagagaagtgtcttcaaagctgagaagaaatctgcagaacaatgctgagtgggtttatcaaggggccattaggcaaattgatgatatcgacgtgaggttccagaaagcagccagtggcaccactgggacctaccaagagtggaaggacaaggcccagaatctgtaccaggaactgttgactcaggaaggccaagccagtttccagggactcaaggataacgtgtttgatggcttggtacgagttactcaagaattccatatgaaagtcaagcatctgattgactcactcattgattttctgaacttccccagattccagtttccggggaaacctgggatatacactagggaggaactttgcactatgttcataagggaggtagggacggtactgtcccaggtatattcgaaagtccataatggttcagaaatactgttttcctatttccaagacctagtgattacacttcctttcgagttaaggaaacataaactaatagatgtaatctcgatgtatagggaactgttgaaagatttatcaaaagaagcccaagaggtatttaaagccattcagtctctcaagaccacagaggtgctacgtaatcttcaggaccttttacaattcattttccaactaatagaagataacattaaacagctgaaagagatgaaatttacttatcttattaattatatccaagatgagatcaacacaatcttcagtgattatatcccatatgtttttaaattgttgaaagaaaacctatgccttaatcttcataagttcaatgaatttattcaaaacgagcttcaggaagcttctcaagagttacagcagatccatcaatacattatggcccttcgtgaagaatattttgatccaagtatagttggctggacagtgaaatattatgaacttgaagaaaagatagtcagtctgatcaagaacctgttagttgctcttaaggacttccattctgaatatattgtcagtgcctctaactttacttcccaactctcaagtcaagttgagcaatttctgcacagaaatattcaggaatatcttagcatccttaccgatccagatggaaaagggaaagagaagattgcagagctttctgccactgctcaggaaataattaaaagccaggccattgcgacgaagaaaataatttctgattaccaccagcagtttagatataaactgcaagatttttcagaccaactctctgattactatgaaaaatttattgctgaatccaaaagattgattgacctgtccattcaaaactaccacacatttctgatatacatcacggagttactgaaaaagctgcaatcaaccacagtcatgaacccctacatgaagcttgctccaggagaacttactatcatcctctaattttttaaaagaaatcttcatttattcttcttttccaattgaactttcacatagcacagaaaaaattcaaactgcctatattgataaaaccatacagtgagccagccttgcagtaggcagtagactataagcagaagcacatatgaactggacctgcaccaaagctggcaccagggctcggaaggtctctgaactcagaaggatggcattttttgcaagttaaagaaaatcaggatctgagttattttgctaaacttgggggaggaggaacaaataaatggagtctttattgtgtatcata

SEQ ID NO: 473 - DNA, 14647 bp, Homo sapiens
  source 1..14647: mol_type = genomic DNA; note = NC_000014.9:c21104722-21090076 ZNF219 [organism=Homo sapiens] [GeneID=51222] [chromosome=14]
ccactcttccaaggtgtcacaaacagaaaagagctgcagcggacgccactgcaatgtcaaggcaaggcagccaggctgcgctctatcctcactggtgcctggccctggctaggccgggagaagcagcattctctagggaaagaagccttctcaagtgggaacaaaaatgagtgtgaggcgaacagccatcccgggcactatgtgaatttggggtgagttctcttggtactccagctgtggtcaatttctagtttctagcggccagcaagctgcccagctgctgctgctagtgggactcccagttctcccgggcttttcccaagcccaagcgagcctgttatctttgcacacttgcaaaggtcgtaaacggtgggggtgaacgcagccagaacttcagcaacccgaccgcagccgagatcaaaggtcggcgggtcagcccagaggccaagcctgcgcagtcccgctcccgcgttggagataaagggtggcggcagcgcaggctcgttacaccggcgtgctcgcaagaggcgggaaagcgttagggagagacgcgggtcgcagggtccctccctctgcctgccctatctacccgcctgcccagcgagcctgtccatcttcagcgcccaggccctaggggaggggacgagaaaggccccgcgcttctgactcatcatctccaacccctttctcgcgcgcgctccaagtctcaggacttcggacctgggccctcctgcgagggggtgcggcgacagcatctgggaagccccagctctgccaagcgtcagctccgagccctcgccagtctctgaagctgccagcgcagggctggggacccagatccagctctctattgcagtggctgggggagcggcacgccagtgcaggaccgcccgcccggctcctccccgaacgcggggccagtggtcgcgtccgagaaagcgccaggctaggccccgacttccccgcctcgcgtcactcagcacatccaacagcgcccctaccgcggagagaaggctctttatttcctagccggtcacgggctagcggggcatcctgggacttgtagtctccgctacagtagaaaggagatggatcgaaaggggaactggggcactcctgaattggattcagggagttggcgtgtgcagggtccgggatttggagtggatgggattatgaaaggtggacagaaaagaaaagtgcgatgaggcaaatgtgaagctgtatggggaggtgacaggaagagaggatatggatgcaagggagaaagcagcttttcagggtggtgaggtgaggatatattctcgtccaggtgtatcttcccctaacagggaaggaacgaaaaaagggcctgctttgagtgaaaactgaaggcactcccggacttcctattggactcgaaggatcccagcaagcttctgagtttggtggggtgggatgcaggaatgtctggagagcattctctcagggtggaaggagagcagcacgtgtctgttcccgctgtcccaccctctcatttgctcctgtgctggccaccgtgggaccattctccaaaccaggaacctcttccaactcagagaagccctgaaaaccagagacaggtgtgagcaaattgtagaggtgagaaaggagaaaccccagacagaaacaactgcttcctcctgcccaattttctatcctgtttcccatagtcctgccaatatttaggcagcttcctaatgctttcccactcttttaacctcaatcatttggattcccagtttcctcttacccaccattaggggagaaatgttcaaagccagagaaagccaatcagtttcattctaggacctcttcttttctctcctgccccattattttcccttaagtgccactgaccaggataggcagtggaaaaattagttggcagctagctattcgtgctttcttccctgcccccatacctcctgcagctcttgatagtgcagactctggctcctgcagcatcctggtttcctctggctcagcaagaatagggcgtgcactgagaccagcactccccctagggtgaaggcctcagcactgagttccagcaccagcaagccagcatgctgcaggtagacagggctgagaatgcagggaccccgcacctgtttgcccctgcccttttcccttcccacctcctcttgcctccttatcctcccaccttctccttcattgaccagtacctgggaggaggcagttggggcaggccccaaggctgtcttcatcacctcgaccaccaccactatgaaacccaagatcaagttgaaggtgttgaatatcatcatggcccgcacctgccagtgagccagctcagccctgcccagcctaggggagtcattccaacctcaatccccacttgcagcctagctgaagacaaaactcagcttctgcttctcagcctccaaacagggccataagccctcttaacttttttgctttcctcctcagtgattgaggccagtcagtggtgacagctgagagaatgagtcaacacttagccacttacttcctaggctgagggttgtaggtgtctgttttagggagtgggaggacagtgctgcgttttcttccctctcaccttccaaaggcggggtgctctgcgaagctccagagtgacagtcccagtgaggagaccctgaatggtgagaagggcaagtgttgagctctggtcccgttaggaaggggccctgggaccttccaccctcccttgtggtgggtcttactgaggctccaggcccaagaggcagcgctgtggccatgtgacaatcagagttcaggcaggcgactgagacagcaaggggcaccacaaccactgccagccatagctggctcacctgggggtaagggtagggtaattggggaggaactgtcagggattccctcccttctcgtaactcctacctctttagagatcaggaaatgggattgaatgcagggtggaggaaagcagtcaacccagagcaaggacgtgatcattaaaaattaagtatcatttaattttttctgcctcatattgtagtttagttacttacctgtatgttttcccccacaagatggaagctacttgggagattaagggtcttgccttgtttatttctatgttttcctctaccctcctcccattcagaacctagctcagtttctggcacatggtaggtgctcacttaacatggatggatggatggatggaattgaattgggtagaagtggacatgctgagacctgggatggggtagcctggcctcaccgctagcaccaagaggtgcccactctgcctgtgccttgcccagtgttgtagcttttccagacgaaggctgtgtctctcctgctcttgctcaccagctctatcttccatggctcctttgcccacaagaattaggtgcttcctaggctgggaaaaatgcgttataggttctgtctattaggagacaggacatgcaacaacgtatctttcagctacacctctgcccactcccaatatccagggatttgaggtccaggtcctcacacctacctagtctgaagcagctactccaaagggatgggacccagctgggtcctaggtctcctaaggggcttgatagctcagagcagacgacaaacttgtcctggcagaggaaggctgtcagggatggggtgtggtggggcaaaggtttctatgaaggcctaaggatctagggagtggccctgggtagataccggcctcagttcactccacaagatgtctagcccgacctcactctgttcccatttctcattaccctcatttctgcccatcctgggttccttttctggtttcacttacctcatccccatggacactatcactctggacctcaattccccctcatttccatatgatcttactcctttctttggcttcctcctcaaattatgtgcccttccctagagatcctactttctgtctggattggtcccctgtcattactacttgcagctttgcccccagaccaggtaaggttgaattccaggggctttcttgcctctcactttctggacagtctcccttccttctttcttgaaggttttactctgaactgaacactgactcaatggatgggggggaccctgtttatggtggggattgtttttgattcaatgataacctgcaactggacattatctatctatctatctatctatctcatggtcctcaaatagtgagtcttgggaaggatgctattgcaacaattaatatttttgagagagaaggtgcctcatagccagacagacctgagctggaatcttagctctgctgcttctccatctgtgtgatcttggatacattattattattattattattatattattgagacaggggctcactgtcacccaggctggagtgcagtggcatgatcatggctcactgtagccaacaccttctgggcacaaataatcatcctgcctcagtctcccaagtagctgggatcacaggcacatgccaccatgcctggctaatttttaaattttttgtagagacagggtcgtctcacaatgttgcctaagctggtctcaaactcctgggctcaagccatcctccctgcttggcctcccaaactgctgggattacaggtgtgggccactgtgtctgtcctgatagatatgtttttctacctattcgcacctcagtttattcactgataaaagggggctaacaatatgactgtgaagagttgttgattcagggtgggtgtttaataactattagtggtgctgatgaggtcacaccgataagtctgatgcccatacactaaaagtgttattcagaaggaagctggggacacatttctacagtcggaagcagaaccagctgggcccaaatatactctatagatcaaaacaaatcccagatctacctaggtgcccttggcaagttgcttaatctctctgttcccttatctataaaaggaagttaataataccagtctcaaggggttgctttcagcatggaagagagcttagcccagtacctggtacacaagtgctcaatgttagtggctatgatcatcatcactattattatttcttgttgttgacgataagaggagactgcgccagaagactctagaagttagtacgaggagggaggcagggtcctgggaggcaagtgatcttttgtaagccactcctgccccatcagtgctgtgccaacatcggcgggtcattgtatctactcttttctttcccggggagtgggagtcacgttttaaagagatccagaaaactgctgtgtgtctactcctcctcaattcccacgtgcattgattttatttggtggcgatgtgagatgttgggcttgcactgaggatccccgagcctgcaggccactggggaaacagacttcctgaagcctcatttttcttacttgtaaatgggggctaatttaattatagagggttattggaaagattatatactattagataggtgaacaggcattcagtaaatattgactaaatctgagtatactacttaccagtttgtagtctagactacaatcgcctggaaggaaggtaccacttctttctcatccctcacagcgctgagcccagtgcctggcacttagtaagcactcagtaaatatttgttgtattgaagagccattaaagtgacttgaggaatggaaaatagaattcgagaggaaggcgcaggaattgtttatcaagaacggaaaggaccgaagagtaactttaataatgtttcttatacggccgacattaactatctctataatcgcccctcctcctcccccaaaagagagacagaaattgtaagggagaggctttgagataaaaccccaggaagaacttcccgagtctgtgcatgttggggcagaaagagcggcagagccaactccttccctggtatgtccgggtttagggagggaggggcagtgctgcttggaggctgggggaaggacgagatgacctttcaaaatctcttccagtctcctgttggaatcctctgtgcgccccacccccgctccctcccttcctccctccctccgacagcgccccccgtctccaaaccgcccgcaccccgcccctggcggccgcctctcgcggctcccggggtccccagctccctgtccccggagccagagcccggctcccgcgcggctcccagccccgccgcgccgccccccgcatgctaatggccgggccgcctcccgccgcacacaatgcgggccagggccgggggcgggggaccggggagggggcgggggccgggccgggggcgggggggccggggcccggcgcatctcccccggccccacgtaacgctgacgcccgcgccgccggcccgccgcccgccgccgccgccgccgccgccgcccgctccgccgccgcccgcccggggctcgtgagtagccgctcccccgactcccgggcccccccgtccgccacccggcccccgcccccggccccctcccccctcccggagggggggcccgctcagcgcgcccggctcggagcaggtgcagggggcgggggcgggggaggggcgccggctcggccccaagcaaacttcgcccagagctcctgggggggcggggtgggggtggcggcctcggaagcctggagagctggggggccccaagggagggggggccaggtggaagagctgggggagcagacaccaaagggaagggccaacgggggggatgtggcgggggaggtggcgggtgtctttgtaggggcccgaaggcagggcgcgagggacctgggggtgaggggcggcagagccgcgagcctgagtggatgtgcaccccccaacccccggcccaggtagggctggtgggggagggggaaggagcccaaactctctggaagcacggggtggcgggggaggggaaaggatggggggtgcttccctctttgcgtcccaaacaaagtgtcacaaagagctcggcccgcggcagcagcggaggcggctgtaactcagcttttgttctcctggccgggggtagctgagccttggcctccctatctcccaaccctgccccccatcatccttctggcttatcttcctggggaggggtctggggtgctgctggaaaaacctctccggcaggatagcaggtcctaccctacttagcaatctatttctgggagggggattttcccagaggctcccttgatcgcccctacctcccagtctgaggaccgaggctcacgtgggtgctaagactgacttttctagggtcagctccacttaaagggacttagggctggctacatgcccctctttcccaaacccaggtcttccagaactttcaaaatcaaaatcggggttgcgttaggacatgcctctgggataagattccccatggtgggatggcagcaggtgagcaggtgtgccttcctctcgcctcctgctgtacctttgaagtccatggctgaggttccatgtccctaactcaggagagtgaggacagagggaaggaggctttaccaagatctcagtctaaaaaggctggtgagctgcagagtggagcgggttaggaggagctatctgagcagtgaggttcagagggccatggagaggagaccataaaagtgaactactggtgtgtctgtgtgatcaaggtagtcttttgaacgtagaccgccctagaagctccctttccttttaaccccatctagtgcagtggtaatcataattgttagcagatttgggaggtctaggattctcaagagggaaaaccatcgtgttagaggtgaccagaggcagttacaactggaccccagaagtcctgaacccttgctccttacactttgaccctaaaaacttttgaatcacaagacttgagggacagtctttgtggtccatttagcaaatacttctatgtacctgtccttgttgtttctaagtcttttcaccaaccattccatccttctctactgagtaaggtttagtggtccacacccacttccctaccagctgccccagcatgtaaggataattggcctactgcttttgaaaggtttctgatatctatccctggccccgcatccttatagaatccaaataagggcaagataacccctgattcccagtgggggtggaaagtaggtcagtgctgctgtctggccaagtctcgaggatggtgtttaaggcctgactatagaaaactctgtgattattgtccaggggcaatatatgcatgacctcggttccaaggcagttcatagtatcccagtccctgtcagttctttcccctactgagaaaaaaatcatgggatcaggtgtctggaacctggtttgatatggagatgattcagatcttcattgggcctaagaaggtatctcagtgagttttgttgattttaggccaccttctggggaaactttccgtgctggggaattcagcttcagtttgggccttcttgtatatcactctatttctgttctggaaactgctatgtgcaaagtggtttattgttgttttgttttgggataggaagctttgcccttttctgactcttcttgcctcagatatgaggccagcttcctaagagattttgcttgctatcctacagacagttttaggggccctagaatcttctcagaatgagagtatgtgcccataggttagtcagctatgaccatgcagtattcccagcccccccgccccacgcctccaccatctgcttcctctgaatataccagattggctgtacaccaggatgttccgggaatccccaggagagcaacagaatgtgatggacccaaatatgatgcctcagtaactcattccaggatgtacaaactgtaactgtcaggatgctccttatagctaattaaaattcttctagttacatctattttctattagctctttctattttcagtgacatctaaaaggccaaaataatccctctggtaccactgggtttttttctatggttttcagataggaacgaaaaaaaaatgctctagcttttctgtgttgtatctgcgatgctaaaatggcaaacagcccctctagcacctcatagctctatctatggtactgaggtggcccaagtggcttctgtggtagcccactgcactctccatggtactgaagggatgaccatttgttttaacatctctctggggtccaaaagagtcctgtgacttagaatcacaaacttttttcgagcaggaagggactaacactataaattagtccaatccccttattttactgatgagtaaactgggaggttaagtgatttagtaaaggttgtagggttatcaatgttcagactaggcctacaatagccttgtacccttcagtcctattctaattcaccttttgtgacactattcagtaagcctggctaggctcttagtcccaggaaaggatccagaggatgagagtgggtgccctaatttgaagctacagaaatacacatattaagtggtagtggaggtcgtctagtgacccttggacaaggacactttgttaattaatcatctgctaataataatcctatagcccagattccacatgtaacaggtacctgccccttcatggagttttaccacatccactaaatgtcaaaaattaaagaagccttggacctccagagccttttctctctgctgacaggcaggttgactcctggcacagttcttttctattaaagatccttaggcaaagtaatgcttgcatctttttctttctcagtaacccatttcagttttgtgatgcctattgtaaggaagttctttatatctcaaatatcctttcttagacaaaaaaaaaaaaaaaaaaaggttagacccacattcatttagccttgaccagatactattctatatgaggcagaaaggtagactagatgacttctggtcatcctcccaggtctgtttccatgaatcttgattctggggtttcttctaagtcctcatgctaaactcctctgcagcttaggatcagcacccgcccccccccccaacccctatcctcttcctctcaatgatcttctccttccccagcactggagctctgcaagtcccaggcctagggaattttagcctggagaattttaaccctttcctgctcagagcatgtgctgagtccctatctgtgcagatggcccagccccgccccccgtccctcactccagcctcttgagctcagagccagtgtaatcctcctcttgtgtgagggagcctctcccctgcagagaggaggaaagcctgcctcggaacagccctggacaaaggggctcagatgccccatcatactgcaggctccaaggtttgaaacaaggggatgaatcctatacggtatttgcagtttttagccccttccccaggctagctgtgccccttaacttccactcctcccccaactctctcttcattccctctccctctggctccctcccccttcatgcccctccccctctgtctgtcttcagactctgctgctgggaggtgtttctctcccatgcatgaatgagtctctgtaatgaatggaaatgaatggatcaggaatccaggcggagggagggagaatgaggggggaaagacagaaagacagggtaagggcagaaggaagcactgtggaacctggaaggatgtttggctggctgctcagttagggatctcagagcaactggtcccacttggataaatggggagcatggcaagcccacctcatttgctcaccacactgcatagcccaacctacatgggagaggggcatattgtgatggtcttccccaccgccagggggtggggtggtagctgtggttgttctggaccatgcatttaaaatatagaatttggggaagaaatctggattatctgggaggcttgtaggcttggcaagtcaagaggtacagtttttgagtatagcagccccttcgtgcctcaagaagcaagtagggagaatggattggttttgggaatacagaatgctgagagtctgggggtagggagtgactttactgctgaaaactagggctcatcttttcctccaaatctgtctcttgctttagctccacagcacctgttgccttcattagcagcttttcctcctcttccctgcacttcccagaaccaaagaatgtgaagggggtccatggaggtgagtgaagctctggcttcaacctacaagtacctacaactgtatactccctctcctgcctacctctctctctctttgacctcccattattagaagttaactccttggccctgacatctcgattcccatacacctccccccaccccatcttcccgaggtgagtagcaccctgtgttcctagttcaggccccagcccaccttccctcgtgttgtccttctggccctcgaggcgacgcccttgcttcctttacagctctaccttcaccctttgctctacgcagatctttctccacagggctcacgtccccgcgccccgagcggccacttagcgccgtcgccgccggctttcgacggcgagctggatctgcagcgatactccaacgggccagccgtgagcgcagggtcgctcgggatgggagcggtgagctggtctgagagtcgtgcaggcgaacggcgcttcccctgccctgtatgcgggaagcgcttccgcttcaactctatccttgctttgcacctgcgggcgcacccaggagcccaggccttccagtgccctcactgcggccaccgcgcggcgcagcgggctctgctgcgctcgcacctgcgcacacaccagcccgagcgcccacgtagtcctgctgcacgcctgttgctggagttggaagagcgcgcgctactacgcgaggcccgactggggagagcccgaagctcagggggcatgcaggccacccctgccactgagggtctggcgcggccccaggctccttcatcgtccgccttccgttgcccctactgcaaaggcaagtttcgcacctcggcggagcgcgaacgccacctgcacatcctgcataggccctggaagtgcggcctgtgcagtttcggctccagccaggaggaggagctgctgcaccacagcctgacggcccacggggctcccgagcgtcccctggcggccacctccgctgcgcctccgcctcagcctcagcctcagcctccaccccagcccgaacccagatcagtcccccagccggagccggagccggagcccgaacgtgaggcaaccccgaccccagctcctgccgctcccgaggagcccccagcgcctccggagttccgctgccaagtgtgcggccagagctttacacagtcttggtttctcaagggccacatgcgtaagcacaaggcctccttcgatcatgcgtgtccggtgtgcggccgctgcttcaaggagccctggttccttaagaaccacatgaaggtgcacgccagcaagctgggcccactgcgtgccccggggcctgcctccgggcctgcccgcgccccccagcctcctgacctcggcctgctggcctatgagccgttgggcccagcgctcctcttggccccggctcccaccccggccgagcgccgtgagcccccgagcctcttgggctacctgagcctgcgagctggcgagggccggcccaacggcgagggtgctgagcccggtcccggccgcagcttcggaggcttccgcccgctgtcctctgctctcccggcccgggctcgccggcaccgtgcggaggagcctgaggaagaagaggaggtggtggaggccgaggaggaaacctgggcccggggcaggtcgctgggctctctggcttccctgcacccgcgcccgggtgagggaccggggcactctgcctctgctgctggggcccaggcaagatcgaccgccacgcagggtatgtaggtaccctccgctctccgggtacgccgcgtcctcctctgactcttacgccgccactccctcgtagcttccttgttaaaagaacttacgtttaatttctcctgagtttttttgttttgttttgttttgttttcctggaggctttgccatcatttgagaacacttaactctttagtcacaacaaatctaacccctcagactttgtttcctcctggaccccgaggggaagcagccctatgggatgggtgtggggtgggtgcgcggcacctggacagggtgtgggcccccctgacttcctcttaacgtatgtgttgcagaagagaatgggctgttggttggagggacccggcctgaagggggccggggcgccaccggcaaggattgtcctttctgcggaaaatctttccgctcagcacatcacctcaaagtgcatctgcgagtgcacacaggtgagggaggcagcctccggcgtggagaggggactgggggcgggcagaaaggtgagggctaccgaaacactaggaggtgaagtttgttccgaagccttcagtttggctggatgagatcacttgggaaacgctcctttattaaatcaaagtgggtgggagacgcagtgccctttcttggttctgagaatgaggtctgtaaattgggcgaaattcgggtgggtgcgtgcagtcatcgtgaccccgtgaccctatcgcacccactctccccaggcgagcggccctacaagtgtccgcactgcgactacgcgggcacccagtccggctcgctcaagtatcacctacagcgccaccaccgggagcagaggagcggggccggccccgggccacccccggagccaccgcctccttcccagcggggttcggccccgcaatctggagccaagccgtctccgcagcctgcgacctgggtggagggcgcctcaagtccccggcctccttctagcggtgctgggccggggtcccgtcggaagcccgccagccctgggaggaccctgcgcaacgggcgaggcggtgaggccgaacccctggacctgtccttgcgggcagggccgggaggcgaggccgggcctgggggtgccctccaccgctgcctcttctgcccgttcgccactggagccccagagctcatggccttgcaccttcaagtgcaccacagccgccgggctaggggccgccggccaccccaggctgacgcgtccccgccctatgcccgagtaccatcaggagagacccctcccagtccttcgcaggaaggggaggagggctccgggctgtccagacccggagaggcagggctgggggggcaagaacggtagtgggccctcaggggcgattagcttagtgagcttaccccgccggagcgggggagcgctagaggtagttgggtagagaagccagcagggggcagcgtgggacccatatcccagccccaggcggaccagaggtggaaggcgcggcgggcgtaggagggtgggctggcggtacccacccagcccaagggagtcacagtgccttagaagtggcagaggtgagggtcaaagaacggggtccctgggctggcagagaaggtttgtgtccctgttgaggagccactctgccagtctttgctggtccataggcgtgagagtttatttttgtacaaggggtgagggtggggggcactgtacccttctagccccatcaggggccctgtagacgtcgctatttttggtacgattcctgtcatccctattgcagagtcgtgtccccaataaacaggtgtcttgaggcacaggg

SEQ ID NO: 474 - DNA, 2750 bp, Homo sapiens
  source 1..2750: mol_type = genomic DNA; note = NC_000005.10:141177790-141180539 PCDHB8 [organism=Homo sapiens] [GeneID=56128] [chromosome=5]
tggcgctgcaggataagaaggcacaaaccagaaccgcagctgcagctccattaaccggcaaaaagcagcagaacctggaagtccacggggagcttggatgccaaagggaggacggctgggtcctctggagaggactactcactggcatatttctgaggtatctgtagaaaaccacagcctcagatactggggactttacagtcccacagaaccgtcctcccaggaagctgaattcagcaagaacaatggaggccagcgggaagctcatttgcagacaaaggcaagtccttttttcctttctccttttgggcttatctctggcgggcgcggcggaacctagaagctattctgtggtggaggaaactgagggcagctcctttgtcaccaatttagcaaaggacctgggtctggagcagagggaattctccaggcggggggttagggttgtttccagagggaacaaactacatttgcagctcaatcaggagaccgcggatttgttgctaaatgagaaattggaccgtgaggatctgtgcggtcacacagagccctgtgtgctacgtttccaagtgttgctagagagtcccttcgagttttttcaagctgagctgcaagtaatagacataaacgaccactctccagtatttctggacaaacaaatgttggtgaaagtatcagagagcagtcctcctgggactgcgtttcctctgaagaatgctgaagacttagatataggccaaaacaatattgagaactatataatcagccccaactcctattttcgggtcctcacccgcaaacgcagtgatggcaggaaatacccagagctggtgctggacaaagcgctggaccgagaggaagaagctgagctcaggttaacactcacagcactggatggtggctctccgcccagatctggcactgctcaggtctacattgaagttgtcgatgtcaatgataatgcccctgaatttgagcagcctttctatagggtgcagatctctgaggacagtccaataagcttcctggttgtgaaggtctctgccacggatgtagacacaggagtcaacggagagatttcctattcacttttccaagcttcagatgagataagcaaaacttttaaggtcgatttcttgacaggagaaattcgactaaagaaacaacttgatttcgaaaaatttcagtcctatgaagtcaatatcgaggcgagagatgctggaggcttttctggaaaatgcaccgttctgattcaagtgatagatgtgaacgaccatgccccagaagttaccatgtctgcatttaccagcccaatacctgagaatgcgcctgaaactgtggttgcacttttcagtgtttcagaccttgattcaggagaaaatgggaaaataagttgctccattcaggaggatctacccttcctcctgaaatcttctgtggggaacttttacaccctactaacagagacaccactagacagagaaagcagagccgagtacaacgtcactatcaccgtcactgacttagggacacccaggctgacaacacatctcaatatgaccgtgctggtgtcggacgtcaatgacaacgcccccgccttcacccaaacctcctacaccctgttcgtccgcgagaacaacagccccgccctgcacatcggcagcgtcagcgccacagacagagactcgggcaccaacgcccaggtcacctactcgctgctgccgccccaggatccgcacctgcccctcgcctccctggtctccatcaacacagacaacggccacctgttcgccctcaggtcgctggactacgaggccctgcaggcgttcgagttccgggtgggcgcttcagaccgcggctccccggctttgagcagcgaggcgctggtgcgcgtgctggtgctggacgccaacgacaactcgcccttcgtgctgtacccgctgcagaatggctccgcgccctgcaccgagctggtgccccgggcggccgagccgggctacctggtgaccaaggtggtggcggtggacggcgactcgggccagaacgcctggctgtcgtaccagctgctcaaggccacggagcccgggctgttcggtgtgtgggcgcacaatggcgaggtgcgcaccgccaggctgctgagcgagcgcgacgcggccaagcagaggctggtggtgctggtcaaggacaatggcgagcctccgtgctcggccaccgccacgctgcacgtgctcctggtggacggcttctcccagccctacctgccgcttccggaggctgccccagcccagggccaggccgactctctcaccgtctacctggtggtggcgttggcctcggtgtcttcgctcttcctcttctcggtgctcctgttcgtggcggtgctgctgtgtaggaggagcagggcggcctcggtgggtcgctgctcagtgcctgagggcccctttccagggcatctggtggacgtgaggggcaccgggagcctgtctcagaactatcagtacgaggtgtgcctggcaggaggctcagggacgaatgagttccagctcctgaaaccagtattacctaatattcagggccattcttttgggccagaaatggaacaaaactctaactttaggaatggctttggtttcagccttcagttaaagtaattgatttcatattatatattttaatttttatgatcaattcaaaggaatggttttctgtcaacttagcataaattttaaattacactacatttgcccata

SEQ ID NO: 475 - DNA, 2711 bp, Homo sapiens
  source 1..2711: mol_type = genomic DNA; note = NG_000017.2:145923-148633 PCDHB8 [organism=Homo sapiens] [GeneID=56128] [chromosome=5]
tggcgctgcaggataagaaggcacaaaccagaaccgcagctgcagctccattaaccggcaaaaagcagcagaacctggaagtccacggggagcttggatgccaaagggaggacggctgggtcctctggagaggactactcactggcatatttctgaggtatctgtagaaaaccacagcctcagatactggggactttacagtcccacagaaccgtcctcccaggaagctgaattcagcaagaacaatggaggccagcgggaagctcatttgcagacaaaggcaagtccttttttcctttctccttttgggcttatctctggcgggcgcggcggaacctagaagctattctgtggtggaggaaactgagggcagctcctttgtcaccaatttagcaaaggacctgggtctggagcagagggaattctccaggcggggggttagggttgtttccagagggaacaaactacatttgcagctcaatcaggagaccgcggatttgttgctaaatgagaaattggaccgtgaggatctgtgcggtcacacagagccctgtgtgctacgtttccaagtgttgctagagagtcccttcgagttttttcaagctgagctgcaagtaatagacataaacgaccactctccagtatttctggacaaacaaatgttggtgaaagtatcagagagcagtcctcctgggactgcgtttcctctgaagaatgctgaagacttagatataggccaaaacaatattgagaactatataatcagccccaactcctattttcgggtcctcacccgcaaacgcagtgatggcaggaaatacccagagctggtgctggacaacgcgctggaccgagaggaagaagctgagctcaggttaacactcacagcactggatggtggctctccgcccagatctggcactgctcaggtctacattgaagttgtcgatgtcaatgataatgcccctgaatttcagcagcctttctatagggtgcagatctctgaggacagtccaataagcttcctggttgtgaaggtctctgccacggatgtagacacaggagtcaacggagagatttcctattcacttttccaagcttcagatgagataagcaaaacttttaaggtcgatttcttgacaggagaaattcgactaaagaaacaacttgatttcgaaaaatttcagtcctatgaagtcaatatcgaggcgagagatgctggaggcttttctggaaaatgcaccgttctgattcaagtgatagatgtgaacgaccatgccccagaagttaccatgtctgcatttaccagcccaatacctgagaatgcgcctgaaactgtggttgcacttttcagtgtttcagaccttgattcaggagaaaatgggaaaataagttgctccattcaggaggatctacccttcctcctgaaatcttctgtggggaacttttacaccctactaacagagacaccactagacagagaaagcagagccgagtacaacgtcactatcaccgtcactgacttagggacacccaggctgacaacacatctcaatatgaccgtgctggtgtcggacgtcaatgacaacgcccccgccttcacccaaacctcctacaccctgttcgtccgcgagaacaacagccccgccctgcacatcggcagcgtcagcgccacagacagagactcgggcaccaacgcccaggtcacctactcgctgctgccgccccaggatccgcacctgcccctcgcctccctggtctccatcaacacagacaacggccacctgttcgccctcaggtcgctggactacgaggccctgcaggcgttcgagttccgggtgggcgcttcagaccgcggctccccggctttgagcagcgaggcgctggtgcgcgtgctggtgctggacgccaacgacaactcgcccttcgtgctgtacccgctgcagaatggctccgcgccctgcaccgagctggtgccccgggcggccgagccgggctacctggtgaccaaggtggtggcggtggacggcgactcgggccagaacgcctggctgtcgtaccagctgctcaaggccacggagcccgggctgttcggtgtgtgggcgcacaatggcgaggtgcgcaccgccaggctgctgagcgagcgcgacgcggccaagcagaggctggtggtgctggtcaaggacaatggcgagcctccgtgctcggccaccgccacgctgcacttgctcctggtggacggcttctcccagccctacctgccgcttccggaggctgccccagcccagggccaggccgactctctcaccgtctacctggtggtggcgttggcctcggtgtcttcgctcttcctcttctcggtgctcctgttcgtggcggtgctgctgtgtaggaggagcagggcggcctcggtgggtcgctgctcagtgcctgagggcccctttccagggcatctggtggacgtgaggggcaccgggagcctgtctcagaactatcagtacgaggtgtgcctggcaggaggctcagggacgaatgagttccagttcctgaaaccagtattacctaatattcagggccattcttttgggccagaaatggaacaaaactctaactttaggaatggctttggtttcagccttcagttaaagtaattgatttcatattatatattttaatttttatgatcaattcaaaggaatggttttctgtca

SEQ ID NO: 476 - DNA, 25684 bp, Homo sapiens
  source 1..25684: mol_type = genomic DNA; note = NC_000017.11:c17837017-17811334 SREBF1 [organism=Homo sapiens] [GeneID=6720] [chromosome=17]
ccgcccagcagagctgcggccgggggaacccagtttccgaggaacttttcgccggcgccgggccgcctctgaggccagggcaggacacgaacgcgcggagcggcggcggcgactgagagccggggccgcggcggcgctccctaggaagggccgtacgaggcggcgggcccggcgggcctcccggaggaggcggctgcgccatggacgagccacccttcagcgaggcggctttggagcaggcgctgggcgagccgtgcgatctggacgcggcgctgctgaccgacatcgaaggtgcgtcagggcgggcagggcttgaagctgcgccgggtggcgcgagtagggggcgcgcaggtgtctccctggcctttgtctcccccacgggcgccagctccgtgctgtgctcgcgcgggacttcccggtgtctctgagctcggtgtcccgagcctcaccgagcctccctggttcccgcgctagcgtctcgggccgcgcgcttgtgggtgagggctcctgggccgggccggggtcccttggcggctccgggccgggacacgtgcgcctctacgcgtcccaggccgggtgccgcccgaccggtgactctccagccctgtgatggccacggctgaagctggggacccaggcgtcgccgaagctccgccccagccccagccgtgacgtaattgcgaggttactcacggtcattccctccggcccgagagttcagctcggcgtcggagctcttgcgcatgcgcatgggcgctgcctcgcgcccttcccccgcctcgtgtcgggttctcccggtctgcgacgggcacagcctccgcactcattcactgacatccaccgaatgccaggccccgtcttaggcaccgagggtttacagacagacctgggtaccccctcttttagggaacacaaaaatctcccgggaaaccaaacgggtatttagttgtaccttgggtggagcgaggctgggggagggcagggatgtggctactttgggtagagcggtcagggacttctaagctgagacctgagggtcacccccaggaccagcaaggaaagatgttttccaggccacggcaagggaagggcaaaggcctcgaggcagggcctaagtgtgaggagttagaggcttgcaaaggagtgaggtcagggaggaggaggacgcaaaccgacttggtcggccagggaaagggcggagcagaacagtggcaccggcttccatctttggagcatcaccctggctgtgatgagaaggggtttggggccaatggtggcaccaagtgccaattaggaggcccgttgcttccattttgtagatagagcaaacggaagcccctagcaaattgcctgcatggtttctgtgcaggagttttagcagcactagctaagttgcacttggttgatgaggaaactgaggccaaggtcgcaggaacaagatgcctagactcacagcctgaatggacatgtccatggaacccgtggccaccctggggttggcaaaacagatatatctatgccaccaccactcctgccctactgcagccttgcagatgagcccagctggttgccagccccagaagcttcccagccctccctccttccccctggggctgggctaggggaggaccccagaggagaggccctgattgtgaggcttttccaaaacagcctcccctatccctggcacgaggggttgtccttcactgccctctggagtgatgaaccctgaaatcccaagccctagggagatctgggcctgactcaactaccagttccacatcactgggcccagtgagtgtagtcccaagaggcaacgtgaccaagccaggaggacatgcgctttggggtcagaacttgaacctggacactcctcacttcctttgtcatcctgctcaagccctctcaccctctaaaccttagtttccacctccagaaaaatgatgcaaaccctcccttcatgggcaagttggacaacagaacccgttctgggccacaggtctgatacagacctttgtttgtttgtttgtttgttttctgcagtggcgcaattttggctcactgcaagctcctcctcctgggttcacgccattctcctgccttagtctcccaagtagctgggactacaggcgccagccaccacgcctggctaattttttgtatttttagtagagacggggtttcactgtgctagccaggatggtctcgatctcctgaccttgtgatccgcccgcctcagcctcccaaagtgctgggattacaggtgtgagccaccgctcccagcccagacctttcttactgacagaatctggtctgggccagaggtctgatacagacctttcttactgactcatggataaaaacattgtctctccagaaccaaaggccaggcatgggcagccatgtggcccaaggtctagtctatgagagagtgggggcagtcccagccccttgaagactgggggcagccccttctcactaggcagggctcagctttacccacttcagtagaggatttttcagtttttattcaaacttcctgtttttcttcccaattacacacatcttttttcattgtagaaaacttagaaaatgcaagtgagcaaaaagaagaaaataaaatctttagacctggggtggtggctcacacctataatcccagcacttgggaggtcgaagcaagaggatgacttgtgtccaggagtttgagaccagcctgggcaacatgacaaaatcctgtctctacaaaaataaaaaattagctgggtgtgggtgacatgtgcctgtagtctcagctactctggaggctgaagtgggaggattgcttgagcctggacttagaggctgcagtgagctataaccatgccgttgcactcagcctggatgacagagtgagattctgtttcaaaaaaaactttaaacctaccacccagagataagccctgctaattatgtgaaagagcttttcttctctctctctctctctctctgtgtgtttatatgtgtttggggatgggtgcacactcttcataaacttttttttttttgagacagggtctcgctcttttgcccatgctgtagtccagtggcatgatctcagctcactgcaaactctgcctctcaggttcaagagattctccagctcccaagtagctgggattacagtcatgcaccgccacgcctggttaaattttgtatttttagtagagatggccatgttggccaggctggtctcgaactcctgagctcaggtgatctgcccacctcagcctctcaaaagtgctgggattacagggcatgaaccaccatgcccggccttcatcaattttttaaaaacgactttattgaggtatactttatgtatcacaaaatttacccatttttagtatatcattcaatgatttttagttaactttttgagttgtgtgacaattactagctgtcgaacatttttatcacacagtgagatcccttatacttctttagtcagttcctgttcctgctcccagccccgggcagctgtggatctgtatgtgtgtgtgtatatatatatatatatatatatatttttttttttttttttttttttttttttttgagacggagtcttgctctgtcgcccaggctggagtgcagtggtgcgatcttggctcactgcaagctccgcctcccaggttcaaacagttctgcctcagcctcccgagtagctgggattacaggcacctgccaccacgcccggctaatttttttgtatttttagtagagatggggtttcaccatgttagccaggatggtctcgatctcctgaccttgtgatctgcccacctcggcctcccaacgttctggaattacaggcgtgagccaccgcgcccggctggatctgtatttttataaattaaaatagggtccattggttcacagctgattggaatctgcttggttccatgtcaacagccagacgacagtaaggtttcctcttattacccacctgattccctgtcgatggacacctaggttgttttatctttataaactgctgcagtggacactgaggccggtttttttctttgtttttttttttttgtttgtttgtttttgagacagagtcttgctctgtcacccaggctggagtgcagtggcgcgatctcggctcactgcaaactccgcctcccgggttcacaccattctcctgcctcagcctcccgagtagcttgggactataggtgcgtgccaccatgcctggctaattttttgtatttttagtagagacggggtttcaccgtgttagccaggatggtctcgatctcctgacctcatgatctgcccgcctcggcctcccaaagtgctgggattacaggcgtgagccactgtgcctggccactgaggccagtctttgcccggatcctcactgtgttcctaggatgaggttctgggaggggaattgctggtcagaggtcgagcctgcttttgaagcttcttctaccaggagtggagctgagcaggtttgataaggtctgaagatttgggggtggaaatgccaggtcccttgagagacatgagggataagagggggccaggctggccttgagtgccagagtgcagagctgggctagatgtgaggacagtcgggggtcagagcaggggcacaccgagcttcagttccctctggctgcttggatggaggatcgtaatgtgaacagaaaacactaattgagtacttactgtgtttcagacagtgtgttgataatcccacttaatcccctgacaaccccaagtaggtagacatatgatgaagatgacggccttgaggaccagagaggttaagtgatttgcctgagatcacacagccagatgatggcaaagccagaattcaaacccaggctgtgggctccagagcctagctcttaagctcttaagcactgggctcctaagaatggggatgaggggttgagggaggctcctccacaggggctactctgggggcctggaagtgggtcacagaggggtcagaggctatgtggctacctccccatcccagtccagagcagtgtttgagtcattagactgggaaccagccctggtgagccagccaagggccttgggccccatccggtcctgctgcctgccacagccaaactcttgtcatgtgaatggatttggggatggagctgcctccatgagtccttgcatctgtgggtgaaggcactgccctggctatagtgtccctgggtttgagtcctgcatctgcaccaagacctcaggtgagcctgtctccttctgggcctcagagtaccttgcagctgtcgggggaggatggatcaggagatggccctgtacctgtgttggggattattgttaagcccgtggcagtcttcacctccctgctgaggattaatttatccaattttgcacaagcttatgagtgcagaagaggcagacggaaacagagttctggccaagagcctggaacagggcctcggggtctctttcctatgcctggaccccgtcatgtctgctctttgtctgtcggaccccagatgtctgccaagccccgtcagaggctgcttcccagaaagcccttctgggtgtcaccttgccccgagcagtgcgttctcagagttctcccgccctgatgtccctcccagcatgcccagcccagccacaacagggccttgcttctagtcatgtgtctggctgtttgctgggtccaggccagccctggtagggcacaatgggggcccgctctgccaccccatacctctccccaggatatctcatgccccagttctctccctagttccaccaagcactggcactccttagaaaacacagctctagactagttactgccctagcttacagcacagaactcccctggtctccaaccattcatggctccctagtgctccaagataaagttcccttgtctcagccgggttgggagttaccttctgcccaacattcacctagctggacacaaacatcctgagtgacccggtcagctccaggcaggagtcactgccagcagaggcctgggatctggactttgcctgctgacaggtggagcccaggccggccagaggaagtgcctctgaccttgtctcctagcagccacgggccatgtggacatgccttttgaccctgggcactgacagtgtgtgacagcctgcaccatgtgctccacaggggcggctgtgtgtgtcgggggtgaggtggggaaagccttaactggctcaggggtgagaggtcagggagccattgagactggctccaggtgtgggtcccctgctgggttggggcttgtgggaggtgggacggggctgggggtccatccccctagggggaatttgtggcctaccccgaaccctgtttgagctcctttcctaactgactccccgtccctgcacctgtctcccagcaggccttgcctctgcatgctgcccctgccaggctctggggtccctgtgctccctgcagctagaaggctgggatcaggggtcttaacaagcagccctactgtatgaccttggacaagtccaagaaccttcaggttcttaacaatgtaaagggagcagtactaaaagcagcttcttggaattgtggggatccgatgagtgaaggcttaagcagtgcatggcacatagtaggccctgaaccaatgccagttagtgttattattatcaccatttagccagatgcagtggctcacgcctataatcttattgactttagaggctgaggttggaggattgcttgagaccaggagttcaagaccagcctgggcaacatagcaaggccctgtttgttttagagaaaacaaacaaatcaccatttagagcacctaaccagtacctggcacgcgataggtttagctcaacaaatgttagcagcaattacccaaggagcctgtgctggaagtttctaggatgtaccaggctatggttccaagttctgagcatctaccatgtggtggtctggagttggtgagagacaggatggggctgactaggccagtggggagcaccccccgccatggggaacaagcaccctatccttggcttccatggaagataattgatgctgggcacagtggctcacgcctgtaatcccagcactttgggaggctgaggcagggggatcgcttgagtctgggagttcaagaccagcctgggcaacattgtgagacccaaactaaaaaaattagcttggcatggtggagtgtgcctgtcgtcccagctactcaggaggctgaggctaaagctggaggattgcttgagcccaggaggttgaggctgcagtgagccatgatcataccactacactccagcctgggcaacatagtgaggccctgtctcaaaacaaacaaacaaaaagaacctgctgaggaagcagtgtttctggctgggggaggacgggcagagtggccatctggccacagatggcggtttctgtgcaaaacacatcaaggcagccttggaaatgtgagtgaaagcaccttcaaagttctggtcacagccttgggactaagcaaagccaccaaaagtacataaaagacaatgaccatcacccagtgccggtgatgctagaaggaaagggaatacgttgtagggaaggttgtaaagggctttatcttttccagactggagcctggcagctcgaaaacatcttgctgccttcatatgagctttaaaacaagctgcagagaaacaactcaagagggagaaatatatatatatatgtgtgtgtgtgtgtatgtgtgagtgtgtgtgtgtgtgtgtatacatatatatatatatatatatatatatatatttttttttttttttaagatggagtctcgttctgtcaccaggctggagtgcagtggtacaatctcggctcactgcaacctccgcctcctgggttcaaatgattctcctgcgtcagcctcccaagcagctgggactataggcacataccaccacgcccagctaatttttgtatttttagtagaggctggatttcaccatgttggccaggatggttttgatctcctgacctcgtgatctgcctgccttagcctcccaaagtgttgggattacaggcgtgagccagtttgtttttagagacggggtcttgctctgtcacccaggctggaataccatggcacaatcacagctcgctgcaatgttgaactcccgggttcaagggatcctcccacctcagcctccagagtaatggagactacaggctcatgccaccatgcccagctatttttaaaactttgtagagatggggccttgctacattgcccaggctggtcttgaactcctgggctcaagtgatctgcctgcctttgcctcccaaagtgctgttattacaggtgtgagcccctgcgcctaaccttagcactgccattttgactgaaaacaggtgcccagcagcaggggctactcccagaattgccactgcatcaggcccgtgggttgttttcagctgccagtgataagtatgtgccctgggccacctctcggacaaggtgtctgaattggtgccgaccagcatcacatgtaattgccatctcgcaggtgctgctgagggtaattccgcacacctgtagctccgggaagagcctagtggggaggaggaaacgtggctctgaggtttatagggtcagacggtcagtatgttgggagctggcatgtggaggggcacagacaagggaagaatgggaggtggcatcagagcaagttttgatggaggaataggaattcaccaggtggaaagggcattcctggtggagggaacagcctggccttcaatagcttgtggtgttcagaaagcaggcagggaaagggaggcccagggagacaccagttaggggatgggggtggaggcagacgagggtggaggaagccatggctggagtctgcacggcctctgactggggtccctgctgtggtcagccctgtgctgggtgaggctggggtcacagctggttcaggccctgacaggaggggcccccagctgaggcccagcctctaatttggcagggcaggtggataggtctgggggggtggtggttaggaagcctccaggaggaggcagtgccggagctgagccttaaagagcttcgtgttgtcctctctgtctttgcactctgcacacactcactgaactgcgacaaatgaggatagctggtcagggcagaggcaggccggagttggggctcactgctgtcccccacaggctggggctgaagggcaggctctggggccgcagaatggggtttgtgtaccagattcttcatatggcagctgtgggactttgggcacgaggcctccgtctgagccttagtttcctcaagaggacctgcgcccaggtgcacctggggctccagccatgggtgcgtcccattccgggaagagctggcacacacttgtgcccccggggcagccatgagtgcacaaagggcagcctgtgccactgctggatacacgaccagctgagaacacgaggaccgccgactccagttaggaggatcaaggaagtgcctggtgggagcagaacagcaggtggggtgcagcccagctccctggagggatggtgggcacccatcctcaccctgctgcctccattagcaggccgagagggtgtgctctggaatcccatgagcacctgtgccacatcctcccctgtggctgacccttcttcacagttggtgcagctttgtggtctgtagtgcagggatcaattggcaaatccctttcccacccattccctggagaattggggtccttggctcagatgacagaccaacctgagttggaatcccagctccttggtggccgtcctggcctccaccccctcactgcctccgctcctcctatcctgcccacgcccactgcagggcctttgcacacactgtttcttctgccctcccttccggcccactccctcatatcattcagtcctcctttcagatgtcacctcctaagatgggctgccctgaccacctcatctataatggccccagtgcctggcacaggattggcacacagtagatattgtcagagatggatctgggttctgtggacaaggctgtgggggcaggtgaagagctccctcttccaggaggttgtttggggttcaaggccttgtttgggttgtaggcttctgtgctggtcagcgttgggccctacaagcgcatgccatgaggcctgcccaggatttccctcatggcctcacagaatacatcggccagagtcattaaagggcgcctgcatctgccttcagagagaggtttgaaggtagaactggggagggatgccaggtgggggttcaggtttcctgttgggtcctgatagaatcagggcaggagaggaagaagaagagggaagaggaggaacccaggcttggggaggggtggcagggcttcacaagcctggggaaggtgaactagggagcagttggggccaccatggcccagagtctatgcctcctcttccttcctgtgttcagagtgtgtgtgggaaccacaagggccttctcagtgttcatagggaagcccggttcacccatgggtgggccgcaatttgggtgccacagtgagcccctagagaccagctctcccagcttccaggacagggactaggggaggcaagagaggctcttccttaaattgtgcacccaaggtgcctcagctgccttactctagactggccccgttaactccccttaaaaaaaaaaaaaaaaagactcagtcgaatggtaatggagctccaacgtgaatactgcaagtatcaggcaactcactacctgactttccagttctaaaccattctaattgctgtagagagaactaacctttgttgagactgttgagtgatggatgttttacacacttgctttcccagaattcccacctctggagatcgtaggtgtgggagctcagagggtggggagtggactgtccccatcacacagcaagggaggggctaaaggaagagcagggcctggcatgcagccccagatagcccacttgggtgtgtctctgagggaggctgcagggctggctctagagtttcctttttcagtcttaacctggtgaccagcttccacagaaattggcacggtgactcatgcctgtaatcgcaacacattgggaggccgaggtgggaggatcacctgaggtcaggagttcgagaccagcctggccaacgtggtgaaaccctgtctctactaaaaatacaaaaattacatttcattacaggtgtggtggcgcacacctgtaatcccagctactcaggaggctgaggcaggagagtcacttgaacccgggaggtagaggttgcagtgagctgagatcgtgtcactgcactccagcctgggtgacagagccagactctgtctcaaaaaaaaaaaaaaaaaaaaaagaaattggccagtagatcagccccaggggagagtgagccagggtttggccaggccttgagtttcagaggctggccatggccagtggcacccaggcccttcccccttcctcggggcatcttagcttagtctgtgccctctgcccaagggccagccctctgttcccaggtcacaccccctcctcttggaaggccccccccgccccacccccatcagagtctttaatgactctgctgcccctggggctcagagagcaaccgccctctcccatcgcgcttcctcagtgggatgggagggggttagagcaggaagatgagacaaataaagacacaataagaggcaggaatatgtggtaaagccaagatgggtaaggggaggggacaggcttgactgttcacagtggccctggccctgctgtctcaggctagtatctgcttgttggtctcaccacattctaggctcagaaactggggagcaaagtaatgaaagaaccaggctgggaggccatggggaactcatgcctggagttcagctctcagtgtgcttttgggtcaaggacgcttccctgtcttaagtcactcatgtcagagcctttgccaagagcaatgctgtgttttgttttgggggtgagggaacacccgcgggctgaggggagggttgggccatgctagagaggccgtctgttgtccttgaacctcccaaagctgggaaataagggcctgggctggacggcggtggcgaggacaggttgcgagagagacatggctgggttttcttgcttagggtcctgaatagagagcaaggttgaggccgcagggaccccagcccccaatggactgctgagtcgctgggtctgcccagggttcaggcaccctctcaggttgcagccaactggggtgtggaccaggcagaggcgctggcctgcagtttggggcagaggcaggctttgctggtggtctacttggctgcaaaatcaactggccaggctctgatcactttgtgtgtgtgtgtgtgtgtaacttttacctttgacaaaagagggaagacaggcccaggcacctcctcaaaagaaccctagagcctgtcaccccttccttacccatcttctgtcctagggactgcagcccttcctggcttcccagggccctacaatgaatagtgggtcgggactcacttggtgactgctgggttgtgaggccttgagggggaggggcagacttcacccatctggcagagggacatcggtgctggcagtcaggaaacccttatttccaggcctcagtttcccggaagtgacctgttttcaggagtggcctcatcccagaccatcagccccgctgtggtgaggggtggccccttcctggggctgccctagaagggggaggtccctgcacccaccgcagctgccactcggcagcccttggccttaattaaacgcttcttgcgtactaagtgctgcacccatattatctcccttctaccattcgacgccagggagataatgactgtcctgttttctggaggagtaaacggagggttggagcggttaaggctcgctcagggtgccagcgaaccagtgatttcgaacacagagttctggtgtgttgggccaggacttctctgctttgaccctttaacgaagggggcgggagctgagggccagtgaccgccagtaaccccggcagacgctggcaccgagcgggttaaaggcggacgtccgctagtaaccccaaccccattcagcgccgcggggtgaaactcgagcccccgccgccgtggggaggtggggcgggggccggggccgggccctagcgaggcggcagcgcggccgctgattggccgcgcgcgctcaccccatgcccggcccgcagccccgaagggcggggcggggcgggacctgcaggcggggcggggctggggcggggctgggggcggggcggggcggggcgggcgcgccgcagcgctcaacggcttcaaaaatccgccgcgccttgacaggtgaagtcggcgcggggaggggtagggccaacggcctggacgccccaagggcgggcgcagatcgcggagccatggattgcactttcgaaggtatttttggaggcctccccaccagccctttatacaatgcctccgtctcctgcaggttctcctggggtgggcgggcatgcgggctacgcaacttgagcaggaaagagccccttcccgagggagaaggtgtgacagttaccagctcgctggggaagtggagggctacctccaaccaaattagtgtcccctgcaactcaagggggaagggtttgcttagagacccaaaagcagcatcccgacctaagagggtttggagggagagggtggtcttctctacattctctgcacccgctttgggacaggaccaggaggaagcagggaggagggcccgttgtccctctgccacagcgtctgccctattcagcacccctgcctattgtgggcatcttagacttttcaggaagacagtgggagccctagattgtcaaaattgtcagtttttctttcaggcctcagtttcccccatctatcgaagaggctcacacggactggggtaaagggatgggaaaccctgcagttgaaagtccattatgacttgatgacttgtgacctggggggtccacaaaccaggagagtttctacttgagaagccaggaagactggggctgccaccccatcctgttctgccaactgctctaggaaattcccctcctgcagtagcttccctgcctgggtacctgtcagtaggcaatgttgggtctccactcggtgccagctgcctgccaagcaaagcctcgggcagccgtaccaaaaggggtttagtcttttctgttgtacagatgaggaaactggggccagtgagaggaggctgttggtccaggctccacttcaagctggtggtgggcagggctgggagctcaggctggggatcctgagagcactggaggcccccatgggtcctgtagagcattctgacccagtgggtgccaccacgagtgggttagagggccctgggctgagccagataggctgctagtcaccagctgggggagagggcccttggccaggtggggctgaggtgggagtgtgtcccagtctgtatgaggaggaaggagtcaggacagacagcacttgcttttacagagatgaaatcaaagccctgagtggccaggcctgggtcttgaggctacttggctgcaggcaaagcctggacttgagcccagaactctacacagagacacactggttggccatgtggccagcagctggcttggccctaagccttggtctgttccactgagtaatgggttggtgatggcagcctggctcttggcttcttagtggggcaagaaaaggcagagagacaatagatttgggattttgtagacctgggtttgaaccccactgcatgctcttgggctgcttgtggtcctccctgagcctcagtgtcttttcttgtctccaagatgaggtgagctaatcttttgaggtagtctagggtagtggccagtggttggggcattggagtcaaaatagggtctggactcagttgagtctctgactctataagaacttaggccagtaagtcacctctctacagctcagtttcttcacgtgtagaatggggccaatgatcacatcaccctctcagctgtgggtgaggattaggggtctagcctggccccatcaatgtgggtagccccacagcgggcctggcttttggaccagacccacccttctgacatgggcccccacccttagagtccttctagtgtggatgaggaccctgctctgatctggggtcctcttgggggacttccctgtctgccattctctttggggatcctgcgctgccctaggaagagtgggcccaggctgcacagttggtccttggtcacagaggatcccaccacttcttcagggcctcaaggcaatcctgcctctctctgcacccctcttccccctgtaaactgaggggaggggaaaatcacccactcctcagcagtttctaagttgctttgtcaaattcagtgcccagaggatcctgctgggggtgcgttttaggatgagaccaggagtggccaatggtggggtgtggggcccatcgctcctatatgaagaccccctctgccctagactgctcctccctccccatccccatctccatcccaaagactggagctgctggatctgtggatggaggcgtgccccccgtttcacacattgagaaacaggccccaagtggagccagggaaggctgcacctgggcctctggattccttttgttctgtgtggggttgggggtgatggactgtggagagggcaggagagctgtctggaagggttggtcacctcatgggcaaatgcttggaagctggtctgagtccacggtgcagtgtgtatgtgtgtgtgtgtgtgtgtgtgtatgtgtgtggactcagaggtggatgtcttgtagaatgcatgccccatgaagacaggagtaaaagtttaccaccatccacatcaagctacaggacactcccagctccccagaaagttgcttagttctaggcagggatttcccttattcacagccgggagcagtgcctggcatagtgtgggcactcagcactcagcacatgctcactggatgagtgaatgaatgtgagcctgctgtttgctgtggactaaggatgtttctagatgtttgggcaaataccggatggtgggaagagctcaggctctgaagtctgcagtcttgggcccgaccctgggctcagccccagcctagctgtggggcaagattgtgagccttgtggtgcccaccttgtccaggtattgtgatgcactcgcagcagcaggcattgctttagacagcacaggtgctcgcaaaatggctgtatgtccgggaacaccagctcctgtgggtggctttctgtcctggtggcattgcccacacatacagctgtgtgccaacaagggttgtgcaaataaggttgtgtttggatgtgtgtgatgccctgtttgggggtcagtctctgcctcactcacgcaccctcttctccttttcacagacatgcttcagcttatcaacaaccaagacagtgacttccctggcctatttgacccaccctatgctgggagtggggcagggggcacagaccctgccagccccgataccagctccccaggcagcttgtctccacctcctgccacattgagctcctctcttgaagccttcctgagcgggccgcaggcagcgccctcacccctgtcccctccccagcctgcacccactccattgaagatgtacccgtccatgcccgctttctcccctgggcctggtatcaaggaagagtcagtgccactgagcatcctgcagacccccaccccacagcccctgccaggggccctcctgccacagagcttcccagccccagccccaccgcagttcagctccacccctgtgttaggctaccccagccctccgggaggcttctctacaggtaagggggatgtgtggcgggaggggacacccggggtggggcttccaggagcacaggaagaagcttctgctgtgatgtgagtagaggtctgtgcaggctttagaaactggggctccactcggctgcttgagatgccctgttactagcagtcctggtgtgcttgttgccggggtaggcgcaacctcgcactggaggcctggcttgaagccagtgcatttgcatcagagcccaggcagggactgtccataggaagccacatggggcaatgactcatccaaggccagtcggtgatagagacctgaagagcaggttgaaagtgggagagggaggtctgtgtctgcagccccatgctttatttctgcaggaagccctcccgggaacacccagcagccgctgcctggcctgccactggcttccccgccaggggtcccgcccgtctccttgcacacccaggtccagagtgtggtcccccagcagctactgacagtcacagctgcccccacggcagcccctgtaacgaccactgtgacctcgcagatccagcaggtcccggtgagggggtctggccaggggttggggagggggcagccccagcccagacacacagcttacagccaagcctctcccaccctcaggtcctgctgcagccccacttcatcaaggcagactcgctgcttctgacagccatgaagacagacggagccactgtgaaggcggcaggtctcagtcccctggtctctggcaccactgtgcagacagggcctttgccggtgggtgacgtgggcagggcataagggagtggggtctacacacacacacacatgcccacctggtaacatgtgcctggccctgcagaccctggtgagtggcggaaccatcttggcaacagtcccactggtcgtagatgcggagaagctgcctatcaaccggctcgcagctggcagcaaggccccggcctctgcccagagccgtggagagaagcgcacagcccacaacgccattgagaagcgctaccgctcctccatcaatgacaaaatcattgagctcaaggatctggtggtgggcactgaggcaaaggtgtggagaggcctgcaggggcacagaccggggtgtccctaggaaggaacagatcaggggcaactggaaggaagagagggagtgagactgagcctggacaagcagggaattggaattcagcctccccaggcctggccagcctcgtttatttagttaaactggtttgcaggcctcttcaataaaggtggggctgtgctaggcattggggatgcagcaatgaacaagacagacaaaaattgtccctcaaagaagagccgaccttctggtgggggagatggacagtaggcaggatgaataagtgctcgagaccaccacgtttggctcgttgcagagaaagcaggaagaggatggtgagggtcccctggtggtagccagggaaggcctccctgagatggcggcaggcacagcagcagctagccagaccctgctgtctgcatcttacattctaaccctatgcccggcctgggaggtgggtgctactaggcgaggaacggttcaggtagaaggaacaagtgcaaaggtcctgaggcagtaatgttgcaaagcagctccgcacccccttgctagggctctccaaccccacaacccccgacctgacaggccacctgtgcgctccccctccctcccacaccgtgcagctgaataaatctgctgtcttgcgcaaggccatcgactacattcgctttctgcaacacagcaaccagaaactcaagcaggagaacctaagtctgcgcactgctgtccacaaaagcagtgagtcctggctttattgagctccagtctggcctcttctctagccttgctccacctcccggccccaccccatccctagccccaccccacccttggttctggcccaccctctgccctgcccacctcacccttggctgtagccctgcattcagctctagtcccttggttacctctggtcctgaaagagacctggtgcctccctttggccctaacccagccccatcaaagcgtcctgggctagctttaggagctacagtagtccctaggcctccaagggcctaggctctgatttggggtcacatatccagcctttactcctggctctgttcctttcggcccacagaatctctgaaggatctggtgtcggcctgtggcagtggagggaacacagacgtgctcatggagggcgtgaagactgaggtggaggacacactgaccccacccccctcggatgctggctcacctttccagagcagccccttgtcccttggcagcaggggcagtggcagcggtggcagtggcagtgactcggagcctgacagcccagtctttgaggacagcaaggttgggccctgccacggtgcccccttccccactcccagccatatcctctgagcctcatgacagggccgggaagaccctaacagatcctacctcccatttcatagacagaataactgaggcctggagccacgtggggtcccacagtaaggtgggcagaatcctgaccccccccttcccagccccatgctctctggggtccctccgattctgccctcaccaccctgcccaaccccaccaggcaaagccagagcagcggccgtctctgcacagccggggcatgctggaccgctcccgcctggccctgtgcacgctcgtcttcctctgcctgtcctgcaaccccttggcctccttgctgggggcccgggggcttcccagcccctcagataccaccagcgtctaccatagccctgggcgcaacgtgctgggcaccgagagcagaggtgggaccggccagcctgggcatctttgggagggacactcggggtgagcccccaggcttgtgaacttggggctctggatttcctgggagctgtgtccccagctttccctctgtccatagatggccctggctgggcccagtggctgctgcccccagtggtctggctgctcaatgggctgttggtgctcgtctccttggtgcttctctttgtctacggtgagccagtcacacggccccactcaggccccgccgtgtacttctggaggcatcgcaagcaggctgacctggacctggcccgggtaaggggctggccccggcagagtgggcagggcagggaccccaggctgtgaaggtgctgggtgtcaacccttgttcctgctccctgtgcacaccatgaatctgtcccgtcctccctgtgcctagccacgcatccgcagacccccaccacccctccagagcctgctgtggacggctcttctgagctttggggcagctgctctgacctcacttttctcacctggaaaaccctcatccacagggagactttgcccaggctgcccagcagctgtggctggccctgcgggcactgggccggcccctgcccacctcccacctggacctggcttgtagcctcctctggaacctcatccgtcacctgctgcagcgtctctgggtgggccgctggctggcaggccgggcagggggcctgcagcaggactgtgctctgcgagtggatgctagcgccagcgcccgagacgcagccctggtctaccataagctgcaccagctgcacaccatgggtaggactgagcgtggggcgggctccgaggtgctccctgctgcctgtgctccacccacagcctcatgcctgcttgccttccagggaagcacacaggcgggcacctcactgccaccaacctggcgctgagtgccctgaacctggcagagtgtgcaggggatgccgtgtctgtggcgacgctggccgagatctatgtggcggctgcattgagagtgaagaccagtctcccacgggccttgcattttctgacagtgagtgggttggggggctgggggcttatccctgcagctctctccagaggctccctgggtaagagctacacgggatgtggcagtggttaccagggggactccaggccaagctgggactcggcccggggtctggccccaggctgtgtccactgtgacagcccagtaccctcccctacagcgcttcttcctgagcagtgcccgccaggcctgcctggcacagagtggctcagtgcctcctgccatgcagtggctctgccaccccgtgggccaccgtttcttcgtggatggggactggtccgtgctcagtaccccatgggagagcctgtacagcttggccgggaacccaggtgctctcttaccccttccctgtcccctctcctgtccctcatcctcattcctgtcctgtcccttgtcgcctgaatctctggctgtctctggccaccccagtccttctccctgccatgggttgttgctgtgggggttgcaggaagggaaaggcctgggtgcctctcgttcccattggggctttcagaagcacatgcagggattgatgggcagatggctaattggagaagtgaccccaggcagtgccgctgtggagtaaggaagcggagccaacaatggcatcttctcaagtcggttttcctttggaagcagtgtagggcaggcctcagtgttgtctcctggccaaggctggtgctggtgatagttatgtccacccgctttcccctgtccttggcaggggctgcacccaggggcatgccggcacttcccagtggccctaggtgtggccccagcccacccaggaaaaagcccttagcttggagaggagggtggggccctgctccccaccccactcacctcctcctctccacagtggaccccctggcccaggtgactcagctattccgggaacatctcttagagcgagcactgaactgtgtgacccagcccaaccccagccctgggtcagctgatggggacaagtaagtgtcgttgtgccctcctccaggcaaggcccctccggcgggattctgagaatagctctggcctcaaccctgtggagagagcccagagctgggctaccgtgcgtgccatgcacgcttcattcctctctgagtttcctctccccaccagcctgtgggaggagacagtggcactttgcagagccaggggccaggctgtactctggagggcaggtggggagcaccctcctaggacccctgccatctgttccgacagccagctctctccttccacagggaattctcggatgccctcgggtacctgcagctgctgaacagctgttctgatgctgcgggggctcctgcctacagcttctccatcagttccagcatggccaccaccaccggtgagtccccggcccctgtcctggctcccttctcagctcccccgtgcagcgtgactgagggttcaggggaccctccctcttctgcaggcgtagacccggtggccaagtggtgggcctctctgacagctgtggtgatccactggctgcggcgggatgaggaggcggctgagcggctgtgcccgctggtggagcacctgccccgggtgctgcaggagtctgagtgagtgcacggcaggttcctcctgcctggtcccgggctcagccttcctcatcccctgggcactgtgcctcactcagcctttgttctgtgcaggaggagtcaccaccttttttcctcagggaactcgagccagggaagtggggggcactcagccagggcttgtggactggtctgactggcactcttctgccctggtcccaacaggagacccctgcccagggcagctctgcactccttcaaggctgcccgggccctgctgggctgtgccaaggcagagtctggtccagccagcctgaccatctgtgagaaggccagtgggtacctgcaggacagcctggctaccacaccagccagcagctccattgacaaggtgaggggtggggtcaggggcctggcagggctgggggattcagctttccattccctggttcctctccccagcccccaggggctgcagaagaccatggggttagcccaagcagcacaggatagggggtccagcagaccctgctttttggctaaggcttctgtccagaggagaggggttgcccctatctggcctcagtttccccatccctgggaggaggggggtggatggtgtggtaggatccctttggaggccctgcatcaggagggctggacagctgctcccgggccggtggcgggtgtgggggccgagagaggcgggcggccccgcggtgcattgctgttgcattgcacgtgtgtgaggcgggtgcagtgcctcggcagtgcagcccggagccggcccctggcaccacgggcccccatcctgcccctcccagagctggagccctggtgacccctgccctgcctgccacccccaggccgtgcagctgttcctgtgtgacctgcttcttgtggtgcgcaccagcctgtggcggcagcagcagcccccggccccggccccagcagcccagggcaccagcagcaggccccaggcttccgcccttgagctgcgtggcttccaacgggacctgagcagcctgaggcggctggcacagagcttccggcccgccatgcggagggtgagtgcccgatggccctgtcctcaagacggggagtcaggcagtggtggagatggagagccctgagcctccactctcctggcccccaggtgttcctacatgaggccacggcccggctgatggcgggggccagccccacacggacacaccagctcctcgaccgcagtctgaggcggcgggcaggccccggtggcaaaggaggtgagggggcagctgctgaccagggatgtgctgtctgctcagcagggaagggcgcacatgggatgtgataccaagggaggctgtgtgtgtgtcagacgggacagacaggcctggcgcagtggctcacacctagcactttgggaggctcagttgggaggacagcttgagcccaggagttggaggccgcagtgagcctgagtgacagggagagtccctgtctcaaaaaaaaaaaaagaccaagcatcttcttgatggttacctgatgacaattcctttcacaaggaatcagtggggtgactgtcatttgtgggatacatgactgcacgtgcgtgactcagtctgtggactttgtgtgtgggctgagactagggtggggagaggggaacccgccaggcccccgccaggtacctgtgtgccaggtacaggcggctggtgccgtggcttgtgtgtgggcagggctcccgcgggggcgtggccagcttgagacccatccctgacacatcctcgtgtgcgcaggcgcggtggcggagctggagccgcggcccacgcggcgggagcacgcggaggccttgctgctggcctcctgctacctgccccccggcttcctgtcggcgcccgggcagcgcgtgggcatgctggctgaggcggcgcgcacactcgagaagcttggcgatcgccggctgctgcacgactgtcagcagatgctcatgcgcctgggcggtgggaccactgtcacttccagctagaccccgtgtccccggcctcagcacccctgtctctagccactttggtcccgtgcagcttctgtcctgcgtcgaagctttgaaggccgaaggcagtgcaagagactctggcctccacagttcgacctgcggctgctgtgtgccttcgcggtggaaggcccgaggggcgcgatcttgaccctaagaccggcggccatgatggtgctgacctctggtggccgatcggggcactgcaggggccgagccattttggggggcccccctccttgctctgcaggcaccttagtggcttttttcctcctgtgtacagggaagagaggggtacatttccctgtgctgacggaagccaacttggctttcccggactgcaagcagggctctgccccagaggcctctctctccgtcgtgggagagagacgtgtacatagtgtaggtcagcgtgcttagcctcctgacctgaggctcctgtgctactttgccttttgcaaactttattttcatagattgagaagttttgtacagagaattaaaaatgaaattatttataatctgggttttgtgtcttcagctgatggatgtgctgactagtgagagtgcttgggccctcccccagcacctagggaaaggcttcccctccccctccggccacaaggtacacaacttttaacttagctcttcccgatgtttgtttgttagtgggaggagtggggagggctggctgtatggcctccagcctacctgttccccctgctcccagggcacatggttgggctgtgtcaacccttagggcctccatggggtcagttgtcccttctcacctcccagctctgtccccatcaggtccctgggtggcacgggaggatggactgacttccaggacctgttgtgtgacaggagctacagcttgggtctccctgcaagaagtctggcacgtctcacctcccccatcccggcccctggtcatctcacagcaaagaagcctcctccctcccgacctgccgccacactggagagggggcacaggggcgggggaggtttcctgttctgtgaaaggccgactccctgactccattcatgcccccccccccagcccctcccttcattcccattccccaacctaaagcctggcccggctcccagctgaatctggtcggaatccacgggctgcagattttccaaaacaatcgttgtatctttattgacttttttttttttttttttctgaatgcaatgactgttttttactcttaaggaaaataaacatcttttagaaacagctcgatacacacaa

SEQ ID NO: 477 - DNA, 158676 bp, Homo sapiens
  source 1..158676: mol_type = genomic DNA; note = NC_000015.10:84980467-85139142 PDE8A [organism=Homo sapiens] [GeneID=5151] [chromosome=15]
gcctctcagggtcgctccagggccgcgctaggaaaggtgtggacggtcggagaggacaggaaggagccggctgcaccgcgccagggtctccgcaaaccgggagcccagggagggcgggaagactggcgggggtccgaggcagcccgctacaggatacgtgatggacgcccagagacaccgccctccagctggtgggggaggagccccagccaccaagaagttaagtgactggcccagttcacacagcaagctagtggctgtgtgcgtgtccggggtcctcatgggccccaggcctgcaatgcgtacgccccttcccctggctctgcctttggggtctcggacgcccgactagcactttggttaaaatgagaggaggacgggcgcctgcagcctgcccggtgctgtagctttgcggccgccccggcgcctgtgtaatccgaggcgtggcgcgccaggttttggcctgcgagggagcgcacgtgggctgcggcttctcgcggacgcccaggccccacccacccgggacccggcgcgcggcgccccagtttgactttcactacccccaaaggaggtctttccaccggcctcttttctgggtaacagctccagggctcacacttggtgaccccaccgaggtcaagtagccgctaagttacggagccggaattcgaatttggcggtcgggcttctggtggcctcgggacggaggtggctgtgtgtccctgggcaagtctctttccttctctgggtagcccagtcgggcgccccgcctgtcgtcgccgcgcatgctcagttgcgggcggcgtccggaggaggtggcgggcgccccagctgctttgcattgacgccagcacccgctggaggtcaccgctgggggctcggcgcggcacgctgccggcaaaacccggcccggatcacggagccggagccggagccgtaccgccagcaactcctgggtgcgcgcagccgtttctgcgcttctcgacggtgcggccccaggccccgctggagccgagctgctcccctccctaccctggcggacgtggcccggccgctccgaggggtttccctcggaccccgcgcctaaaccccggccagcgggagcgtctaaggctagccttgtaccccaccggcactcggcctgggggggcttttccgcgaggcggcggcccagcgggcggagcggcgtgggtgtccacatctaggcggagtctggagccggggaggcggcggcggcggcggcgggagcggggccgggcgcggccgggagctcgcctcccccgggggtcgtgccgcagctcggcgagggcagcgtggctcgcgcggcgtggactcagccgctcctgggtaaggagagcgcaaatctcctccccctatttccccggaagcgcggccgaggcgagcccggcgatgtgagaggcggccgtcggctcctgcctcaggaagggcatgttcggaggggcggcctcggcacgccacccgcctaagcgcccccttcccaccgcagccgccgccgccgcagcgcccgcaccgcgataaaaggggcggccgcgtttcctgacgcgagatccgcgctcgccgccgcccgcccaggcggcgatgacacggcgcccgcggcggcccggaggcgccgggtgggccgtttgctgaccggatcgcggctacccgccagcgtgtccgcggcgccgccgccagcatgggctgtgccccgagcatccacatttccgagcgcctggtggccgaggacgcgcctagccccgcggcaccgccgctgtcgtccggcgggccgcgcctcccgcagggccagaagacggccgccttgccccggacccgcggcgccggcctcttggagtcggagcttcgcgacggcagcggcaagaaggtaaggggcgccgggcactctggggccgccgcgaaactcgggcccggccagtaagcaactttcccgcaggggccgggcggggtcccccccacccggcctcggtgccctcttgtcccgctttggatggttctgattgacgccagtctcccgccttgccggggcagcgttcagagaaggaccgacccaggtcccgcgaccctgatttcctagggttgcgattaggacgccgcctgtgtcgcggcgtcggttttttggacacatccgactcccggagcggcggggcccgatgtgaagttgactgaggcgcttgcatcaatttcctctccaagagcgggtgtttgagggaaacccccaggatattctggcgcgcccctgcaatgttaaatcagtgtgaactttgttcttttcctgtggtagaaagggaagggcgactggcctcaccactcttttccctctgtcagctttgcacatgcagttgcaggttaccattttcttcgggactgctagaatgtaatctggaacatcagctttgcttcattgcacatgtatttgaggtccacgtttattagcatacatactgtatttaaagcatatgtaattagaaaatactgtgaaacgcgatttttgaagcattcagcagaacaaagttaatcttttattaagccgacttactgggacattttgtgactggggttttttgtttttttacattgcgtgtcttctccagcgcatgttgccttggcttatgttttgtcaaagtttctgggcttagtctttgttgaggttttctaaaggaaagttaaaaaggaaaaagaaaaacgtgatcattaaggcacacagcagcagctttccagttctctcatttcagaatttaaagctggaactcatgcgttggtttatgttttgttaaaccagtaaaagacaacaacaacaaaattcgtgcatggctgcagattgttggctgtcatccctctcatcacgaccagtttttgaaagagtaatttgcaaaatttgtttgatttttccttgcttgctgagaactgctgaacctccgaagtttgagggatatagtttgatgtactttctgtcttacatttctagcagtcgtcatgatactttttctgtacgaaaggggaaagtctttttcagtgttgcataacagttgatttccccaccattcccataccctaagtgaaaattcaactttgttctgattatcagaaattgaattccttctcctatagattctttaaagaaacctctgatggtttaggcttactaactcaaggtgctcttaatatcagtgttaagctgtgtgttaagcctacttggctttaaaaaagtgttacacaggtgcatatggaaactttaacagctttcaagttttcagtccaaatctaacattttgcagactaatgtgataatttcagattaccaaagtagcccttttatagtgaggggcctttgtgtcttacaggctttttttgtggtggattgggtgtcctaaaattcacctaggtgtcttgtaagcctccccagtgcagcagcagcttgctcttgtgctatcgcagtgccgttaggtccctgagtttttaagtacttacttcaaccattcttctgtattggcagaccattgtcttgtgttgggggctcagaaaatactttcatccttaaagtgcctaacccagtggcatacacatagtaggtactaaataaatgtttactgatttcttaaaaaattgttaactgattgatgaaactttttcagtcattggaatttgatttcataaagcctcctatgtagacttcaaaataatagtatttccagagcaggagtcaaattataaattataacaccacaaccacagaaataatagccccatacttgttattcatgaactgtacatgttgatatctcatttacagttatttgcatttaggcatgtcagatagtagagcagaggtaaatgtcagcattttttctagtctaatattttttctttgaaaatgaatctttttaaattttaagatattaactatgctctggaaattcatgttagagaaggcaaactgctagcaatttagcaaaattaaatcataaaattagtttctttgtattatctcaagatgcaatttaattcattacaaaatttcttattaaaactgtaagtcagcatatctttaagtgaatttcaacaagaaattcattgggggatgcttttatagtcctacagcatttagtaaataccagtttatcagtgtgggtgggagattgataactaattgcatttttaggttaagcagtatgtactttgcgttaaagtgtatcctgcatgtgttctatggaacaatatgtggactgttagtattgtatgagaaaagagttccgtggtctggtaagtttttgggaaatacaggttgaatatccctaatcagaaaatgagaaatgttccaaagtctgttttgagtgctgacatgatgctcaaaggaagtgctcaatggagcatttcagagtttggattttcagattagggatgctgaactggtaaatataatgcagatattccaaaagccaaaaaaaaaaaatccaaaacacttctggtctcaagcatttgggataagagatatgcggcctatactggctcagactaagttcaacagagttcttttatgtagggcttgtcagagaacctaatttctgaaagtaatctgtgagtctccaagtggtttttagagtgtgcatcatttcctaaactagttgattgtggagcccttttcttgaggtgtatgtcaggcaggccacatgttaagacctgattctttatgtgagataccaatattcaaagtacaagaaatataattaacagtaaaactcaacgaatgtaatttgcttcttaatgattccaaaggtactttagatcttgcaatatattaggctgggttgtctgtatgaacttatttaagtattactaaaaataccctctgtctgtttattcctttcgggagtttaagtttatgtggttacagataatgaatgctgtgttcagtttgaacacttagagttttgtttatttttaatcagtgtgagtgagccttaactgtaacattttaatattttcttgccagtctttggatttaccccatttccactttccctagccaggacttgagttgcccttgaaagatttgcatgtagtgttagagaccctatgctcaccccctatcttcctttttgcaaacacccactgcactgctaatgattgatgctccccacaccccaactaatcaactctgtgagatggcagtcatgtttgttttgttcactgctgtatcccccaggcctgatgcacagtaggccttccgtaaacgtatgttgaattagagaattttgtgaaccaggctgtcaagttgaaaatccacccaggccaggtaagtagaaatagaagccagttttaaccagagtagaggctgtaaagtttggatttggttttgtggaaatctctggttattgctcttcagagcactgtacccagggaataatatatttctaccctgttgagcagagtagatttccctgtaaagaaagattaaagaggctgggcgcggtggctcatgtctatagtcccagcactttgggaggccaaggcagaaggattgctagagcccaggagtttgagaccagcctggacaacatctcaagactctgtctctaccaaaaaataaaaaaaattagctgggcatggcaccgcacacctttagtcccagatacttgggaggctgaggtgggaggatcacctgaggtaagaagttcaaggttgctgtgagccgagagtgcgtccctgcactccagcctgggcaacagacagaaaccctatctcaaaaataaataataaataaaagatgtaaggattagtgcagctaaggtgatagataatagtacagctgcaagccaacctctaatcgagtgttactgctgtcagcactcacttaaaatctcagacattctctagttggtccatttctgtttccctttgcttctgtcattcacttccttcaacctcttttctcttactttgcatcacctcccgtcccacttccatcttcctccttgcttttttctgctagcccaccttcctgcacaaaactggccactcttgccatcttagtcaactaaagtttagtggtttccaaatgttacttaagtaacatttggaatggaataaaatttattgcctgctcctagtttacaaagtggattagtcaaaactttttttttttttttaagacagcgtcttgctttgttacccaggctggagtgcagtggcacaaccatggctcactcagccttgacctcctgggctcaagtgatccccccacctcagcctcccaagtaactgggactacaggtgcgcaccatgcatggccagttttttaaactttttttttgtcgagacgagatcttgctgtgctgcccaggctaggctcaaactcctgggctcctgtgattcccccagcctcagcctaccaaagtgctgggattacaggtgtgggttactgtgcccaactgattactcaaaattttacatttggctaaactaaagcaattttctctttgtgtgtgacctgactgatttttttcctccagtaggggtctttgacccttgctagattatatggaattactgaaagtttcctttgaaagtgtagttgagaaaaatgagaccaaactttctgctgccatagtaagtgactacagtttatctctagagctcaggggttgtgagttccctcattgtgttcttgtgcttttcagtatatagaaagatatttctttattcattttcttgaattccttttacatacataaaatactttgcatttatagcatatgttttttagtacttactgtcattgccaccataactttaagtgtgattcttaagatagacattgtcacaattctgttacctgaaacctgtccctgaccagctttgaccctcgccttgctgaggtaaggtttatgatagggcctgtggtcccttctggcgcaaatgtttcctgtgaagtggcttatgactggttttcccttggatagcttacccatttggattggttccttttttttttttttttttttttaaagacagttttttgctcttgttgcccaggctggagtgtaatggtgcgatctcagcttaccacaacctccgcctcccgggtcgaagcaattcgcatgccttagcctcccgagtagctgggattacaggcttgcaccaccatgcccggctaattttttttttgtatatttagtagagatggggtttctccatattggtcaggctggttttgaactcctgatctcaggtgatctgcccacctcggcctcccagagtgctgggattacaggtgtgagccaccgcgcccggccttggattggttcttaaataggagaaggttcatgatgtgaggacacagggtgaggcagacatcccagagtaaccttaaaggacagaatattttaaaaaattttaaaaaaaagaacagagggataagtacttaggacatgagtaagccctcagtcttacccaagcttagtggcttcatcctggtttctcagtacactgaggcagtaggaggtgatggattctgcagttcttagagtgcaaactattcatattaataatagccaccatttcttggatgccctctgtgttgcaagcaccatgttagatgctttaaagatgttatctcatttaatcctttcaaccctgtgaggtggcaggtatcatttccctttagcagataagacaccagaggttagaaacttgtccgaggtcatacatttaagctgagattcaaatccactggtcctggctctcacctgttaggttgttgctctctgttaactagctatgttcattgcatttcccattctttggtcttctgctaagctacagatttcacaggacaactgggttttaagcaggcatcttgaatctgcattatcaggattttgttaagtttcgacttactgtggaagttggttacagctctaccttaggttcctgtgtttgaggaagttgaagtcatcttcagccctgtgccagttaactcctgaagctagatattttgtgacgccctctgaatctgccctctttgctgtctgaaatgagttgggagggcatcccttgggagtttttttcctttcccctttctcctgctcaggtttcaggcagcctgccctaccaagagttccccaggagctggttctttccattgccctttgcctagagtgctgttcccccaccagtgctgcatgtacctatcttctcaggagttagtcaaggcccagctgaaagcttccttgagcccttggctggcttgcactcttttctctgctcttgggacctgctcctgtatccgtgtgagcctaggatttctgtcttcagccttctgctggattatatgctgcttgagggcaagcactgtgtcctagtttccttatagttcccaaagtgcttggcacacttggtaaatatttggataagtacaccagtctctaaggctgaaagggcttttattcatgttccacgagtctatctcaccttgtttagatttaacaaaagttgttggggtgtattctgtgttttaacagaaagctaaaatacccttaagccagtgattaatctgtggggtgattagtaaagcttttgcctccaattttgtctgagttagggttaagcaatgttcctgagtcccctccttctgttctacttttgttctgctctgtgtggtaaagagtggtagagtatcatgtcagagagctgttttgacaagtttatattgcatgtcttagctacaggcaccatgtgtagtttgcccatccacacaggaaggatgttgcagatttcccagaactttgagggtgacctccaataatttgggatggggggctttgccagtgcttttattctgtattggttggaaatagacctttgctgttttgaattcatcctctttcactgcttgccttctccctttcatgtcctattagggagtacaggagctgcttcacttcctcttactctgcttataggataacccaaagcgctggtggcacatcagcagttcccaggttgtctgcaaaggtttggtgttgatggcagctccctagtgaggtgttaaaagactataggaggaggagccagaagatgtgtgttttgggtccagctccatcaggctttggctatgtgatacttggcaactcctgatcctgagttttctcaagtacagagtgaagctagaatacctgggttctggtaaggataactaaaaataatctgtgtgaaagtgttttgtaaactccaagacactatcgcatgtaaggattgaccattttcttatgagaacctttctcaaaggcaaacttggttcaaatatatctattttttaacgcagatctcatttttaatatagtttttctccaatattttgtgaaaattttcatagagcaaagttgagagaattatgcactcatatgcctgccatctggattctgcagttaacagttttctatatttgtcttatatctgtccactcctttatccatccatcaacccattttatttttggattcatttcaaagtaagttccacacatcagtatactcaacccctaaatattgcagtatgtatatcaagtactagagcgcaaaatttgaactttgggcatggtaacacacacctgtagtcccatctactcaggagctgaggcagaaggattgctcgagcccaggtgttcgagaccagcctgggcaatatagcaagacctcatctcaaaaaaaaattaattcaaaattaaataaattcaaagtttacatttttaaatgtgaaatgccataaagtaaaatgtgtaaattttatgtgtaccatttgtgagatatgacaaatgtatatgtctatgtactatgaatctctgtcaagatacagaattacacaatattataatcacccccaaaagttctattgtgctccctttccattcttacccccagccaccagcaaccactgttctgaattttttccattataaattatttttgcctattctagatttcatgtaaatagaaccttacagtctattctttttttataaggcttatttcactcagcataatgtttttgagattcttctatgctgcacgagtcagtagtttgttcttttttctaattaaagtagtctgttacatgaagaaaccacagttcacttatctattcttttgttattggatactagggctgtttctaatttttggctattatgactaaagctactatgaatattctagtacacattattttgtggacatgtgctttcattccccttggttaaataccaagaggtgaaattgctgggtcataggataggtatatgtgtagctttttaagaaactgcttgaccttttcccaaaatagttatccaatattacactcatgccaacaatgtataataaaagttcagttgctctacatccttcccatcatttggtgttaatcagtattttaattttagccattctggtgggtgtgtagtggtatctcattgtggttttgatttgtatttccttgatggctgatgattttgagtactttttccgtgtgcttgttgttcatttactgtattgctgtctttttaaagtttttattttaatacttttttattaaaaggaaatataaacattatgacctctgggtagggaaggactgattaagcaagttacacaaggcatttacataaaggaaatggttgataaattcaactacgttaaaataaagaacttctcatcaaaagagagtgaaaaggaaagcggcagactggaagaagacatttgcaatgcatagtaccaataaaggattagtattcagagaggtcctaaaagtcaataagaaaacaaccgcccagttgaaaaattggaaaaggttgggacaggcacagcactaagaggaaaccaaatagctaataactatatgaaaaggttttcaacctcattggggaaatgcaaattaaacccacaatgaaataacattttatactcatcaaattggcagacatttaaaaggttggcagtattttgaggaactgctcaacattaagtagaggtgtaaattagttcaactactagggaaaaacccattgtcattgccaggtagagttgaatatgtgaccctgtgacatagcagcttctcttctagaaactcttatatatctttactggaaacatgtacgagaattttcagagcagcattacttttaattccaaactttcctgtaaaacccaaatgtccattaacaacataatggataaaaaagttatgatatgttcaaagaaaggaatacttcacagctgtgaaaaatggattatagttttagatattaactttgataaatctcagtggagagaaagaagaagccatcaaaaaatctgtaagttatgattctttttatttaaagattgataggctgggagtggtggctcacacctgtaatcccagcactttgggaggccgaggcaggaggattacttgaggccaggagtttgagatcagcctggacaacatagcaagaccccatctctaacaacaaaaaaaagattaatagctaaacaatatatagtaatacacacataggtgttaaaacttaccataaaatcagttcaggcaaataaagtttattttaaggacttaaatgtttagcatgttaatttgagtgcctaatatagaggctgtaggaggataacaggccctgctctcagggaacaattagtcctttctggaaaggtggggtaggtctctgacctggaagtgatgatggcaccttgggggatggattgtggaggcaagagcttggtctggattggtcataaggtatagaaagaggaaaggagggagaggtttgacctgggcttaaaagactgggaggatgtggataagtggaaaatatatctctggataaggggaaggaagggtacgggggttgggtgcatgttccaattatgaggaggctgaccagagataggacgggaggtctaaaagccaggttgaggagtttgaagtccatcctataaacctcagagaactcccaaaggcatttcattttcagcggggtagtcaaaggataaacatgtttcatgaagattaggtttcaggcaaaaattgcagtaggtggggtgagggacagctagaggtggggcactatgcaggacctattgcagtggttcaggcacaaggtatgaccaggtatgactaacttagtgcagtagtttgggagaggagggaatgagagaaggaaaaactgactagtgacaaattggacttggtgagtgaaagggcggagagtggagggtgactcagaggttggggtttaccagcttagaaggactgtgataacatgccacaatttgtacagtgctttatggtttaccaaatgctatttttgtacctcatctcatttgatgttccccaaaccatggggaggtggaaaggagggattttattttccctgtttaaggcctaaagaagcagaaattcagagattgaatgacttgttcaagtttgtggtgaccacttacagaaacaggttcactgtaatagcataagggagaagtcacaggaaagcgaatttagggagtttttaaaaaacctttcttgtcttttggttctgagttcatcttataaaaataaacttttacttttcctgattgtaaaagtcatattcattgtagaaaacttgaaacatatagaaaagaacaaggatcggctgggcgtggtggctcatgcctgtaatcccagcactttgggaggccaaggcgggcggatcacaaggtcaggagatcaagaccatcctggctaacacggtgaaaccccgtctcttctaaaaatacaaaaaattagccgggtgtggtggcaggtgcctgtagtcccagctacttgggaggctgaggcaggagaatggcatgaacccaggaggcagagtttgtagtgagccgaaatcgcgccactgcagtccagcctgggcgacagagcgagactccatctcaaaaaaaaaaaaaaaaaaaaaaagaacaaggatcacttaaattgtacaatcacttaaattgcacagtcaggagataatgtctcttaaaatggtggtgtgtttccttccatccatgtagattgctttaaataactataattaaaaacttttttgggctgggcgtagtggctcatgcctgtaaatcccagcacttttgggaggacaagatgggagaatcacgtgaggccaggagtttgagaacagcttgggaaacatagtaagacccccattctctataaaaaaaaataataataaataaattagctgggcatggtggtgcacacctgtaatcccagctacttagactgaggtgggaggattgcttgaggctgggagtttgaggttgcagtgagctatgattgtgccactgcactccaacctgggtgacagagtgagaccctgtctcttaaaaagcaaaaaacaaaaatattttttaagcagttttgttttttagttctaggaaacatttaactattatttatttaaatgttgtccccttaagttttctcattttctcttctgcagctccctccaaaagatagattgagacgcatcttgatctgtcctccgtgtctcttcacttttcttttacttcccctctctgtgctatcttctgggaggattttttagctcaatattttaagtcacgaattcattcctcaaggtctactcagctctttagcccactgagtttttaaatttgagtttttgtcttcagtctatggtttgctcttttttcttaattgcttattcatgttttatggttgcagcatacttccttatctctttgaggatattaattacactcactttaaagtcctattctgattgctgtattaaaaacactttttattgagttataaatgtaatcagccaaggtgtacaaaatccctaagtgtacagcttgatgaattttcctcatgctcccatgtaatcaccagccaaatcaagacagaacatttccagcattccagaaggctgccttgtggctgtttactgttttttagtatttttaacattttatgaaaaatctcaaaatacagcaatcttgaaggatttttcacagggtacccctgtgtacccaatgcctgtattttacattagcattttactgtacttgctttatcacatatatccatgtatccattcttctacctatcatactcctttttctttgatatattttaaagtaattgcaagtgaggacgggagcggtggctcacgcctgtaatcccagcactttgggaggctgaggcaggtggatcacctgaggtcaggagttcaagacctgaccaacatggtgaaaccctgtctctactaaaaatacaaaaaattagctgggcatggtggcaggtgcctataatcctagctactagaggctgaggcaggagaatcgcttgaacccaggaggcagaggctgcagtgagctgagatcacaccattgcactccagcctgggcaacaagggcgaaactctgtctcaaaaaaaaaaaagagagaaaaagcaattgtaaatgttagtatactatacttccccttaaatatttcagcatgaatttgatatttgcttaggttttttccttttgaagcaacatttacacacagtgaaatgcacaaatatttagtgtatatttgctgagttttgacaaacgcatacatatatctgcgtaatccaaacctctatgaagttatagaacattattttcattccagaaagtttcattatgctccttattggacaatctcttcttgcaaccacccttctgatttttttcttaccacagattagttttgcctgttctaattttaatataagtggagttacacagtatgtacctttttttttttttctgaggcagggtctccctctgttgcctagactggagtgcagtgctgtgatcatagttaactgcagccttgacttccctggctcaactgatcctcctcccacctcaacctcctgggtagctgggactacaggtacgcaccaccactcctggctaattaaaaaaattttttttgtagagacagggtctcattatattgctcaggctggtctcaaactcctgggctcaagcagtcctcctgcctcagcttcccaaagtgttgggattacaggtgtgagctaccacgcccagtgtatgtacttttatataagacttctttccctaagcgttatgtttttgggattcatctatgtttcatgtctcagtagttcataatattacacgattaacttttaaaagctcacgataaatattgttaaattgccctccaggaaaatgtgatgaaattttgtaattaaaaaatccctgagtggctgggattataggcatgcactactttaccctgccttgtggtcagatttttatttcataaggagcatgtgagagtgctttgtggtgcattcatcaatctgactgtgagaggtggtattttattggtattttagtttaaacttacttcatttattatttgttactctttatttctccctagtatgttttggacatttgaatgtcctcttctgtgaatttttcatgtttgttgcctatatctctattttggttttagaagttaaattattacttaaaagaactttttaataagtttgaatgttaaattttgacctctcatgtgcattgcaaatttttttcctcaagtatctttttcttttttttagatagtgtttttaaaattttttttaatttaattatttttagagccagggtcttgctctgttgcccaggctggagtgcagtggcagcctcactgcagcctcaaacttttggactcaagtgatcctcccaccttagcctcctgagtagctggggctatagatgtatgccaccatgcctggccgatttttaaaatttttaaaaaagagacaaggtctccccatgttgtccaagtggtcttgaactcctgggctcagaggatactcctgccttagcctctcaaaatgctgagattacaggcatgagctaccgtgcttggcaggtatttgtgtatctaaacatagaaaaagtataataaaaatacagtataaaagataaaaaatgggctgggcatggtggctcatgcctgtaatcccagcactttgggcggctgaggcgggcaaaccacctgaggtcgtaagttcaagaccagccttgccaacatggtgagaccccatttctacttaaaaatacaaaaattaggcgggtatagtggcacatgcctgtaatcgcagctactcaggaggctgaggcaggaaagtcgcttgaacccaggaggcagagattgcagtgagccgagatcgcaccactgcactccatcctggacaacagagcaagactctctcaaaaaaaaaaaaaaaaaaaaaaaaaaaggtggtacacttatataaggcacttagcatgaatgggccttacaggactggaagctgctgagtgagtcagtgaatgagtggtgagtgaatgtgaaggcctacgatattactgtgtactactgtagaccttataaacactgtacacttaggctacactaaatttgttttaaaaatttttatttcttcgataatctcagcttactgtaacttttttactttataaagtttttttaactttctgacacatttgaagtaatacttagcttaaaacgtgaacatattgtatagctgtagctaagtattttttttcttcacatacttactctataagcttttctccattatgtttttttttctttttgagacagggtctcactctgtcacccaggctgtaatgcagtggtgcgatcttggcttactgcaacctctgtctcctgggctcaagtgatcctcccaccttagcctcctaagtagctgggactgcaggtgtgcaccaccatgcctggctaattttttgtatttttttgtagagatggggtcttgctatattgtccaggctggccttgaactcctgggctcaagcaatccacccactttggcctcccaaagtgctgggattacagatatgagccaacgcacccagccttgatttttaaatttaataataaattgcagccattttcccgttttattaatttcttcagaacatttatatgatggtactaatgctgccatgtacatctttttttgtttttttttgagacagagttttgctctcgttgcccaggccggagtgcaatggtgcgatcttggctcaccgcaatccctgcctcccaggttcaagcaattctcctgcctcagccttccgagtaactgggattacaggtgcatgccaccatgccaggctaatttttttgtgtttttagtagagacggggtttctccatgttggtcaggctggtcttgaactcccaacctcaggtgatctgcctgcctcggcctcccaaagtgctgggattgacaggcatgagccactgcgcccagccatgtatatcttcttacaacaggtttaagatgggtacaattttataaggctttgtgcacaaagacttggatttattcttagaatctacttttaagtcttaatttcaggttttaaaacattttagggtagtctgtaatgaaaaagccctaaattaaaaattttttatgtataaacttggctttagataagttacatttacttattgaaatcttccattttcttaagaaatcattcctgagtgggacctttgactttaccatatccaacttactttctcaatttatggaggaggaaatcgaaaccctaaggcagttgtgagacaggtgcaagatcacactgcaagtattggtgaagctgggacaagaaccccaagctaactcttgtcctttatctcatggcaccttttatattcatgggaagtgaaccagttacttcactccctttggtcactgagatggcctggcctcagactctgcatgctcttctaattcaggtttgcaaagtgtagccttgtccagcaggctttactatatcagaagcaataaagaagttgaacacttggaatttctaaacttggatgtcattagaggagttgctagattactgcaaaatggctctgttttcattttgaatgcatgtacagatacctattttttcatctcagtttgtaacccatgcatttggggttggagttggcatgcagtgaaacctacagtatttatcaatatgtagtcagtaactgtatttttgatcagcttcctttacttccctaacatttttaggtaaaaacaggaagtcttgttccttttttctccccaaatcattatgccctgtctttttgttattctagaattaagaaatagggtcttaaaaagccaaaaacttcccatgaggtgaattatagtaaaggctttccttgggatgaagaagtcagggttaaaacctgtgggccagcagtattttcaaaaggcacagaacacctctatggagataattgatagttgactatatgagcaaacatatactcgttttcaatattgctaaaaatcagttcttccattagacactaatctctaatgagattagttttcagacactatgagttagaaattattttagtggttttctagtctgacttcttgaactccatagtaggtattctcttgtcaattctcccatctacacagagaactccagtttggtaaattttcctgataggtcacattctttttttttttttttttgagacggaatcttgctctgtcacctaggctggatttcagtggtgcaatcttgactcactgcaacctctgcctcctgggttcaggcgattctcctgcctcagcctcccaagcagctgggattataggcacctgccaccatgcctagctaatttttgtatttttagtagagatggggtttcaccatgttggccaggcctggtctttgaactcctgacctcaggtgatctgcctgcctcggcctcccagtgtactgggattacaggcgtgagccaccgcgcctggcccatattccttattgaacaataaaatattccctcattcattcagcaaacctttggtgcttaccatgggctaggaactgcactggacacttgctggtaatgtgatgatgaataagacatggcctcccttttttgttgttgttgttgttgttgttgctgttttttgttgtttttgagacggagtctcgctctgtcgccaggctggagttcagtggtgcaatcttggctcactgcaacctctgcctcccgggttcaagcgattctccttcctcagcctcctgagcagctaggactactggcgggcaccagtacacccagctaattttttgtatttttggtagagacgggctttcaccatgttagccaggatggtctccatctcttgaccttgtgattcacctgcctcggcctcccaaagtgctgggattacaggcatgagctactgcgcccggctggcctcccttttaagatgataagctcacaagaccacaggcttgcctctaattgtgtgtgtttccactgcccccttgattttataaaacctgtatagaaatctaaacatattgttgctgcaatacagttaaaaagagcgggggaattgaaatctgaaaacttgcgttcaaattctgggctttctctttggctttggtacttatttagctgtgtgagctggagcaaattgaataacttgtctgtgagccacggttccttgtatataaaatgtggacatgagagaaggtataggaagataccttctaatctgttaatgcaccttagaagtgacagacttttcttgtttttctttgcctattaaccagaattttgttttctcaccagtgggtcactggagaaggaagctgtgttataatcctttcagtgctgctgaatatactgataatggaaaaataaacaggggtgcactggttttctggcctgtaaaccaaaaaacagttttcagtgccaaaagctgtgtttgtcttgcaaggccaagaatgtttctgcagtgtaggacagcttcagatcccactgaatctcttgggtaatcacatggttttggtttaggttcagttgtttatagggctagctttgcttactgtgctcagtttctgctgtagtaaaataatgtaggctggctggaggtggtctctgttcagggttattatgaactggccttgttcttccagtgtgcaggccctggctaatcagagaagtgtacctgtcccatagctaggctctggaaagaccttcaagcatggcatgtgaactgggccctggctcctccccaccaggtccatttggagtcagtggtttctaaatggtggcagtgagtgctttgctctggccctcagccttcttagctttctttaccactgtagagccaggtagctaaaataatctgccctgtttttcttccttatgaggacattttctggaatttttatcccaccttatccattcttctgaaaaacttgtcttcagacctcatttttctaactcccagataaccagaacctacatgcagaggtctaggagatctctaccctgcaagcagaggttcagaaaaggagcagagtgagcaaatgcagataccattgttctgttcccctgtctaacaccccctgtaactcccagttgccaaattcagactcctttctttggtctgtaaagcccagcctgatgggttcctgcgccctctccagcttcttcctgtgcctcacacactgaatgcctcgagtactcacatttccagggacttgataacctctggacttttgacggtgcagtttccttgccaatgctccgcaagaatttcttcccaatttaatcagtgtaattaaccaaaaaaacctcgatgaaggtagagcactaagaaggaagtaggtaactgttaaaagattttatgtctggaaaaaatgcccccttttttttgtatttgcaatattccattacaaaaacaaaaacaaaaaaaggcaagactaagatatgataaagggttccaactgtcaaagtcatgcatgctcagaggatggagaggttcctgtggtctgctgtaggacagtttttccctcctgactgtttcactatggccttgaggacccagagagtggaagaaggtcacggagaatggatggatatcctagggactggaagagcatggtggctggtactgggtatccttgttgaactccaggagggatctgaggttgttgaagtggcttcaccttgttgggcacctgaagacgtcattacaaatcaaagatcttctggatttgatggtgcactgctgagtgttggattatgagatcacagtgagtgtgtggcacaaacacactttctatgatcagcttgatacgtttctagctgtgacaccttattaaagcgtgggtcactagcctggaaataactaagactggtataacaataaagctgtcatgtattgactgtttactgcataccaggcactgttctaagtactttgtgcatgaactaagttaatcttatgacaatccagggggcttgaggttaccttaaaggttcaccttttcaaaattctacctttttttttaagagatggggtctcgctatgttgcccatgctggtcttgaattcctggcctcaagtgatcctcctgcattggcctcctaaaaaactcccacacacgtaaagcagcttttcagtttgtggacaccagcttgggtgccctaaagttcaattcaattctgactggaattagtgtagaccccccaggttaaggaggctgcccccccagttcagatgccaatcgaaagtagtaggtctttaggttgcccctaattgttgtctgacttggctacgaattggaagttctcatgaccaccctcttgggattgatgatttgctagactggctcacagtttacttactagattaccagtttattaggaaggatatatttattaaaggatacaaatgaacagacagacaaagaggtgatacacagggctaggtctagagggtcccaagcacaggagcttcagtgcctgtagagttgggtgcgccaccctctggcatgtggatgtgttcttgttcaccaacctggatggtccctgaacacatctttctggatttttatggaggcttcattacataggcatggttgattaaatcatcggccattggttatcagctcaactctcaacccatttcctctccacttgatcttagccaaaaggccgagaagcgattcccatttcctctcatctttcctgggggaggtgggggaggtatgctgaaaatcccaaccctttaatcctgtggttgcttgctgtggtaaccagcaccccatcttgtggttatctaggggctttccacaaatcacctcattagcataaactccggtgttgtggaaggggcttgttaggaataacagaagtcacttctttcacctttattggcctggagctgctccagagctgtttcaggacaaaagaccaaatattttaacaaaagataagctatgagtgaggaattgtggaagaagaccaaaatatgtatttcttattatatcacaactatactttggtatttctgtgtttttcattttacttctttgagtttagtgagatgtcatgaatttttttttttcagtcaagtttcctgattatattggtcaggtttcttttgactgtaagtgacataatgcattctaaactagctgaagccagaagtggaatttgtggatcaccatattctggcttacataaccagaccaagggaaggacatgggtatgctggcctctggtacaaatgaaaccaggactttttttccatctttccctgtcattggtgccatctttgtttccttgggctactttttgctgttcaacaggaaacaatgtccatcagtagctcctggcctcacattttataacttcatcagtagagagcttcttcccttaattccaatttgaaaatcctggggaaaaaccaagatgggcctggcttggaaacacctgcccaccccagcagccagtggacgacctctgcgatgggcaacaactttcacagaacaggatagttgcaatgagggggagcgcccctcagaggaggtgagggtactgatcagaacaatagctgtccctgcactggggttcagccaaggccccaaaacgctttttcagcataagaattaatactacttttatatgtaatgatagtttttattcctaatcttaccctgaggcagtttgtattctgaattgttagagaacttttccacttactctgtttgctaagagaagaataggtaatttgtaggaaaatttcaacaaggcttcccagttgacgttctcccttacttcgtgtagcctgcctaagagatatttaattaccctgcattgctcatcacttctcattttaccctgtccttagagaagagtggaagactgttctcaaagcagtgattcagggactaaggctccttctatctgtggctcttttatcttcaacatatggttgccaaggttgccatgcttgtctatatggacaagctcccaaaaggagaaaagagcatggagggtcatgagtgagaggtttttaacggccaggtctagaagtggtccatgtcagattacttactttccattggccacatggccacacttcactgaaggctgggaaatatgatctagctgtgtgcccaataagaagaggaactgagtttcagtagccagcaagccagcctctgccacagcttctttggtaacatttgttgcttccccttttcccctttgccatgcataatagttgtgtagtttgggtgggattgagctcatttccagctctagggtgggccccagcaacatccttgcctcatttattggttcagtaatagatacataacccaggcccaagctgagcaggacatggaattcatctggtcccagttactaattcaggggcaggcatgtcatagaaactgtcccaatcagactatggagtggttgggggaagatgttcctcccacctccctcacagccccccacagtgaggacaaagccaactcctgggtgagaataggcttagagaattgcaaacccgtattgtgaagtcctaccaaacctttcctgaagctcgcaagagctgaccctggactctgcgttagcatgaggcagtaaatccactctatcgcctaatactttaagattaattttcttgacttgcaaccacaagcatcctggctgatacaaccaatgaaatggaagaggaatagggagagagaaaggatacaatctgaatctctaagttctgcttccgttcattgctgtcagttctatgatgtttctttgaatacttgaacacaaccaagttgggtctgaatggatgtatcttagtttcacttccccattctctggaattagagtggggataattacattttttaatattcttttttttttttttttacctttagacaatgttttctctctggattgaatgatacatagtttctttgaagaatacattatgacattttatttctcttccaccataatggaatcatatggactcaacatagtccatatgattttttttcctgttttgttttagtgacttttctaaagtttgtcttttcatctaggaagtatatagaatacatttatcttacacattgcagtatgcatttgttttatagctgggtattatctctatattactataggacttttttttgttttttgttttgaaacagggtcttgctgtgtcacccagactggagtatagtggcatgatcacagcttgagctcctgggctcaaatgatcctctcacctcagccccctgagtagctgggactgctgccatgcaccaccacatctggctaatgttttaatttttttgtagagaaaggttctcactatattgcccaggctggtcttgaactcccggactcaagcaatcttcctgccttggcctcccaaagtgttgggattacaagtatgtgccactgtgcccagctgttattacaggaacttttaatattttgagttaaatattccaggccattttagaatttgaatagcttgtcaaatttgttgattttatagcacctccgtcttgaaaaatatgccccctggtgttcctaaaagaacattttgagagaattatatggtatttagtaaggcaattagaaatcaccaagtatttagggactattgcttaagaagctaatttgcacaatcagaattcattagcccaggacacagacaccttatacacctgtggtgacaaatgaaaactgtgaaagtccaatctgattcattcctctcagaatatggaggacaggagagtggggacaacctcagcattaggactgccctctctcgttttgtttcaaaaagagtttaagtaacttaaaaaatacatataataagtttaaaaaaaaaaggaaattgggccaagggaacatggcgagaactgaccaattaagtcaggagtgaggtcagtatgtggaaacacatgccacaggggcatgcatgattgccatggggctgggtcacacgttcggctctgagcttccacagcctcaccaaatacgaaaacagttgcagaattctggagatttaaaaatggcaaatgactcaggagaagtacagtttctgagctcagacctaaagaaattattctctcaggaaggggaacatcacactctggggactgttgtgaggtggggggagggatagcattaggagacatacctaatgctaaatgacgagttaatgggtgcagcacaccagcatggcacatgtatacatatgtaactaaccggcacattgtgcacatgtaccctaaaacttaaagtattattattataataataataataaaagaaagtattctcatgggtcctttcagagggacaaggttctgaacaatgttgccatcataaatgtggtggtgaatgtctctcagtgcaagctgagggcaggatgccatacacagattccaggtggggctaaagtacatggtccaggcactcagttagtttgatttgggaattaacatttagtctacctggaagaatgtggtattacccatttttaatcttggccaattttatttgcattaagttgatttgaaacggatatcagtctttgtccatatgtttatcaaccatttgtaattttttttatattgtctattactttggctgttttcctattggagaaatagagtttttcttcttgtgtagattttttaaaagttaagaatgttaatctttttgtcatgtgtggtgaataactttttttttttccctggtttgccttttaaacttacccctggtaaacatttttaggattgctcactgaaataggagggaattaggctactgtattgcgagtgggaggatgagattagggcatgtatatgatgtcccttctggcattagagacttttgacatgtacttgagaagagggaatatttggaatttggactagtccctacgaagaggagaggaggagtggttggggacatggagaaagcaccttcggcagcacttggtgtccagctgtggtgggacattgtgcatttaattaccattctgcaagctgtgtgatcttcagcagtgtttggccattcttctgtacatgggtgaaagatagacagttagattgatctggaattggagttttgcatttcgcagaatgtccagtagctactgatgagagagcaaaagtgtgggatgtgggtttgggtttgatagaagggaaaagcattagagggggactaggagaacagatgatatagggccaggcagtgtcagttaaaggggccaaatgattatatgcttagagcagtgcctaataggtggagcttctcaacacgattcagcatgggtggtggtggtaagtgaagactgaagaagcagccagccacagtagcacaaaagcaggcaaaacagatctgtgctgttagaattcagcacagtggtactgggaggggacacagggcggcttctagtatgccggtaatgttgcttcttgatctgggtgctggttatacaggtacgttcagtttgcaaaaataaatctattagtacagttacgctatatgtactttctgtgtatgttcaataaaatgtaaaaaataatgaaagagagcacatacttcggtgccccaccacattgttttcagatctcagctctgcaactttatagctgtgagaccttgggcaaattacttaacctgtttgtgcctcagatttcaagtcatataaaatgagaataatacgtacatcacaggagtgctgggaggattaaatgagtctcccaatagtgttgagtacatagtaaatactcccagagtgttgcgtattattattttttaaataattattataaatgcgaatatgtatgagggagaactgatgaattggaaatttgtggtcagagagagctcttggacattctgccaaatgacattcctaagtatggccatacagtggtgcctgtagtggagtggggttggactgcagctcatagtcagaattaaagggaagggtgaggtggttgtgttgccatatgaaccttgaccttgcccagggtgatggtagtacttggagtgagcttgaagcactgaggtccttaatgtatgtgagtgacttagaggtcaagagaaggtggcaggggtggcattgctgtgtgttatgagcctcagggtatctaggagtgacagtgggagagtcagaagctggctccctctaatagggagtggtctgggcagctgtggcctttgcagaaagtcctattccaggactttccctacagtgtctgtgcctgcatagtcagtggctcagggagggatcagaagccagggaactttgcaatgttgtgatggtgaaatatgggttaattatatttgcttcaatatattttcagaattccacgtgctgatacccgtaatactctgtcagaccccattactgcctttctccttgaaccttagctatatctgcttcccctcaccagacccttcctccatactgtgtaactcatcccccacccccagttcagttggagaaagttgaagtcattctagttccacactctgggccccatttttaataaccggaccctgtggctgtggacacattcccattttaaattctgctaccaggtataggtcttgctcttataccttatcctggctacctgccagtactccagcttccccacagctgaggtcttctttgcattcggccaaacccttttctgactccaggccccaagggtgcgagcctatcacctgatatgaacttcctccctcctctagtctgcctgaatcctccattaccaccttcatcccaccctattccaccttgcccctgtctgctgagccatctgcatttgctgaacctcgctaaggcatagtctgccaacattgtctgctgggggtacagagagagcctccctctccctgtgtctcgagttcagcacctattccaccttagtaagcctgtgaggctttccaggcatctctcccaagctggtctgtcccttgtcttcagggctcctgttctgacactgggcccatgggaggtacaagttttgagtcctgtaaaaagaaaaaagaaggaagtgtccttcacacaacttctgacctttttcttcacttcctggtgtgttagtgtgtgagagagagagagagagagagtgtgtgtgtgtgtgtgtgtgtgtgtgtgtgtgtgatgtttagggtctgaggatattcaaagtggaaaagggtataagagctaggtaatttttattttgtgactaggcaaaggcagtctaaaaaactgacctatggagacaattttagttctcttctacctgttaatgtaagagatgtaaaaactaaagtctttcttttcaaagtgactactagaaaatccttttggactgtaggtaatacagaatgtttataatcagaccaacaaaatactattcctacacattgttttctatgacctagaaataaggatgttacagatccttctttgtaatggaatttgttgtcctaagatcatacccattgtaaaatttaggacttttcgttggtaaataataaaatttgtggaaagaagtactcacaaggatttcaggctggagaagggactattggccattgtatttttcctggccagttttcatcaaaagtttagattttctccggactgtggtaggttatcttgtctgttatgacaaaaactaaccaaacaaaaaacaaatgtcacatgctgttagcaggaatgtaaattagcaagattactttggaaaactgttggcaatatttactgaagttgaaaatatgcatgttctctcaccaccagttctacttccagttatatagccagcagaaatgtgtagatatgttcaccaaaagtcactactagaatgtccattgtagtattagtcgtactagctaaaaactagaaataaccccatagttcatcagaagaataagctgtaatataagcatataatgaaacactttatagcaatggaaatgaaagatcattgctacatgcaacaccatgcatgaatttcataagcatcgtgttgagtgaatgaagccagacaaaaaaagattacatgctatatgatttagtttatacaaagttcaaaatcaggcagaactatggtgttggcagttaggacagggctcacctttgaggaaggggaggggtagtgatttggagaaggcttgagggcttttgaatgttctatttttgacctaggtggtaattatatgggtgagttcactttgtgataattaaccaagctgcacacttagggtttatattcttttctgtaagtatgttaaccttcaataaaaatgtccatcaaaaaaactttcagtgtttattatacttgagccacatgttcatatgcacctgtcccttctggtcttagggacttagcatgtgctttagcctcagtctcaaacagtttgacttcctttttgcaaaataatactcatcattttggaaaccttatctgataagctgcttccctctcttccttacacacagaagggagtgtgtagtttccctgttatatcctctgtgggcaccatgtcctgaaccacagctaggagttcacatgtctgtatgtatttgattgcctctcctgatgtttaaacttgaggacgctgggcctatttatgccagtcattatgtctctagggaccactacagtgcctacactcattggtatttgtcaaatgaatgaactgacttcaaagggaacagtctttttttctgtcacccatttcaacttttaattagggttagtaggaggttggagcccctgtgaggttgcatggaacatttttgagataatagtgactttaatagccttaaagtatgacctgtaggaaaactcagctgaaggaggggagcagttattggctaatcagtgtcccttaacctagttctgtgtttcccccagtcgtgttcctgagagtgaagtttatatatgatgacttcatttgttctggcttttctcatgacaatcctaaggtcaagtctattttaagtctgagaaatatgtcctggaagttagtttcagagtccctatttcctttttctctcctttgtattgaaatcttggctgtcctccccattccctccttccaaactgttcttagaaacgactttgcaagtatcataaatatcctctatgttgatttttctctgaactttagctgttctttttcagttagatatggggaagtggcacgttctcactcaccattctaacctgacagaattaagccaaaagcaatgttcagattggcccagtaggaagacgaattgaagatgagacatttacattacactttatttgctggatgatttttgtagggtttttttcttcttgtgtaatgttgttagaagacaggtttggagccagagagtactggtccaaaactcaaccctgtctctccctgctttttgacctttggcaagtttcataacctttcggggccctagctttttcttatttgtaaagtggtggtagttgtccagttttaattaaattttgaatgtaaaatggtctgtcaatgtgtaaaaaattataaaacactcaataaattgcagttgcctaaaagggaagcttcaactttattgttagaaaaataatggttttcctagaagaaaacctaggcattaccattcaggacataggcatgggcaaggactttatgtctaaaacaccaaaagcaatggcaacaaaagccaaaattgacacatgggatctaattaaactaaagagcttctgcacagcaaaagaaactaccatcagagtgaacaggcaacctacaaaatgggagaaaattttcgcaacctgctcatctgacaaagggctaatatccagaatctacaatgaactcaaacaaatttacaagaaaaaaaacaaacaaccccatcaaaaagtgggcgaaggacatgaacagacacttctcaaattaagacatttatgcagccaaaaaacacatgaaaaaatgctcaccatcactggccatcagagaaatgcaaatcaaaaccacaatgagataccatctcacaccagttagaaaggcaatcattaaaaagtcaggaaacagcaggtgctggagaggatgtggagaaataggaacacttttacactgttggtgggactgtaaactagttcaaccattgtggaagtcagtgtggtgattcctcagggatctagaactagaaataccatttgacccagccatctcattactgggtgtatacccaaaggactataaatcatgctgctataaagacacatgcacacgtatgtttattgcagcactattcacaatagcaaagacttggagccaacccaaatatccaacaatgatagactggattaagaaaatgtggcacatatacaccatggaatactatgcagccataaaaaatgatgagttcatgtcctttgtagggacctggatgaaattggaaatcatcattctcagtaaactatcacaaggacaaaaaaccaaacaccgcatgttctcactcataggtgggaattgaacaatgagaacacatggacacaggaaggggaacatcacactctgggggctgttgtgggttggggggaggggggagggatggcattaggagatatacctaatgctaaatgacgagttaatgggtgcagcacaccagcatggcacatgtatacatatgtaactaacctgcacattgtgcacatgtaccctaaaacttaaagtataataataatagaataaaaaaaaaagaagaaaataatggttttaacatacagtattgttagactccgaaaagtagattagggctttctttttaagaatttatttggaaattaattttgatgatttataaatgattatataatacccagttatacaatttacccttgggaacaaagaaggaaatataatattatattggcttgtataatcaccctcttactttggaaacaaaagagtgggagtgggagaattttggagaacctgatccactgttaactctaataatcgtttcctgaagaacagccccatccacagttaaacagaaatctggggatattaaatggagctttgtactcttgtcacttttttctttcttcatcaatttctagttgcttagaattaagggctacactaaatgaccctgcatttgttggtgagaacaggggaagcagagagatgttttgtaagggatggaaggtagtatttacatacaaaattcacagatttggaccttagcaactttgatcctgatgggcttgatagagaaattacaaggttaaaagggctttgagatgtggtggaaagaacagagacttcctataccctgcctctaccactgtgcacttttaacaagttattatcttctctgagcatcacttttcttatctgcaaaatgggaataatgaattctatcttttagagtttttgagattaactgagataatgtgataaatgatacttttcttaaggcagtgaggtagaaaagcaacaaatttttattagctctttcttcctctccttcaatttaatctattatatgtgtttgccagaataaaggaattgtgtttaaaggattgtctgtaattactcaacttagtattttgaaatattttattgtggagaatttataacatgtacaaaagtagaattatgttgtatttgttgcataacaaattaccccaaagtttactggcttaaaacagtaataagcatttatttctcactgtttctttggttcaggaatttgagagaagcggggctcaatagttctggctcatagtctctcttgaggttgcagtcaggtgttggctgggtctttggtcatccaaaacctttagtgggccagcggattcacttccaaggtgcttcactcatatgattggccaagttagtgcaggatgttttggggtttgaggaaaggcccaattcctctccatgtgtgtcagcttcacagggctgctcaggtacccgctggcttcccgcagagaagtgatccaggaagtcaaagcagaagctacaatgccctgtttgacctagcctagactacatattgtcagttccactgtattttatgcattacatataccagccttgattcagggtggagatgatacacgatcttgtgatgataatcacatctttctttcttcctttctttttctttttctttttctttttttttaaagtcagggtcttgctctgtcccccaggctaccaggctggagtgcagtggcatgataatagcttaatgcagcctcgaactcctgggctaaagctattctcctgcttcagcctcccgaggagttggaagtacaggtgcgggccactagtcctggccacagtcatcacatatttcattcattagtggtgatatggcggcaaatggtgatattctaattctctcattactttttcatttaatactgaatacctctataaagagaagctcctctcattaactatgtgataaagtttgaatagcataggcaggataaatgcttgtttcttgttctccatttattataccagttttcagaataatggtttgacttcctaatatcctccaaaggggacctgttaaatgttatttgtattactatgaagttaagtattttaatgtatttgatatgtttcagtcaattgctcttattacctatattgatgttcatatatttataccccttttagagaaatggtggcatactgtacatagtactcttgatttgcttttctcgcttcacagcatatccttgggatcactccatagttgtctatggaggaattgttcattcttaaaaaaattgaaatataattcatatactcgcccttataaagtagacaattcattggttttttagtataatcaaagttgtgcaaccattaccactaatcctagaatgttttcatcaaagaaaccctgtacctaataacagtccctccccattgcctcctgcccctttacccgctacacccccagcctctggcaaccactaatctattttctgtctctctgaatttaccaatgaacgtttgatttaagtaaaatcatataatttctggcctttgtgtctggtttctttcagttagcataatgttttcaaggttcatccatgttttattaatagtttgaatcagttcctccttccttttttagcagcacagtgctccaccggcttgatctgtctataccttagctaaccagctcatgttggtgaacatttgaacatttgagttgtttccctacattattatatgaccttgtgcataagtctttttttttttggacagggttgcccaggctagagagcagtggtgcaatcacagctcaccggagcctcgacctcccgggctcaggtgatcctcctgcctcagcctcctgagtagctgggaccacatcacgcctggctaatttttgtaaagatggagtctcactatggtgcccaggcaggtctcaaaactactgggctcaagcaacccacctgcctcagcctcccaaagtgctgagagtcatcttttttgttttttaatgtgaattttgctaggtgttgttcaatttccctctataagggttgtaccattctgaatttttaccagcagtgtatcagaaagtattatttctctactgccttgccatagaatattttgtgatatctcactatggtttttagttatcattttacttctcatatcgtgattgagattgagcatcttttcacatgtttaaactctgcattcctttttttgttaactatctgtccatatcactctagactctctccaaagggtcgtttgtattttccttccatttttggcatctctttctatattgcaaatattctttccatttctttatttctccttttgttttaagatgacttgtcggctgggcgtggcggctcacacttgtaatcccagcactttgggagggtgaggtgggcaatcactcgaggccaggaattggagaccagcctggccaacatggcaaaacctcgtctctattaaaaatacaaaaatgtgctgagtgtgttggtgcacatccgtaatcccagctacttgggaggctgaggcataacaatcacttgaacccgggaagtggaggttgcagtgagctgaggtcgcgccactcactgtacttcagcctgggtgaccaagcaagacttggtctcaaaataaataaataaataaaatttaaaaaatgacttgtcattgcaaatttaaatttttatgtaattaattctaacaatatttcccctaatatcttctggagtttgagtcataatgggaaagctttccatactccatgttataaaatatttacccatgtactcaatggttttatttttcacatttaaatcttcaatccatttggaatttatcttggtgtatgatatgaggaataaattcagtttaatctttttttccatatggctatggaattattcccagcaccacttattttgttcattcccccacactaatttgagataaattccattcataattgagttcatttctggattctctgtactgttccattagtctctctttaattatgtgccactaccacactgttttaattatagagctgtataagaattatcttgcaaggctattcctctctcttttctttcccttttcagggtcttctggctgttcttgcttgtttgtttttacagatgaactttataattagcttgtctagctgtgggaagaaaactcaaaggttttttctttttattgaggttgtattatatttacaaattagtatagggagaactgacatcattgtgatgttgtatcttcttatacaagaacatggtatgtctttttacttgtttaaatctcttgtggttttttgggagtgtttttatgactctcctcatagagttccttattgagtttatgccagatgttctattattttttgctttcataagtaggattttctcttccattatgtttctaactgaatttcccttttttttttttttaataaatgaagcctgggccgggcgcggtggctcacgcctgtaatcccagcactttgggaggccgaggcgggtggatcatgaggtcaggagatcgagaccatcctggctaacaaggtgaaaccccgtctctactaaaaatacaaaaaattagccgggcgcggtggcgggcgcctgtagtcccagctactcgggaggctgaggcaggagaatggcgtgaacccgggaagcagagcttgcagtgagccgagattgcgccactgcagtccgcagtccggcctgggcgacagagcgagactccaaaaaaaaaaaaaataaataaatgaagcctgttgattttgatatgtttcttatatagcctgctaagttctctgatttgtaatacatagcacataaattctttggggttttccagacatatcattatattatttgtaaatagagttttacctcttttccaatttttagaccactaattgcagtctcttattgcattggatagtatctttaatacagtgttaaaataataaagaagataatgttttatacaaaatagtgtgtcttgtttctaactttgtcaggaaagttctagtttttccccattaatatttagcagacttttacacttttattaaaggaataagaccggacacggtggctcacgcctgtaatcccaacactttgggaggctgaggcgggtggattacttgaggtcaggagttcaagaccagcctggccaacatggtgaaaccctgtctctactaaaaatataaatattagccgggtgtggtggtgggcacctgtaatcccagctactagggaggctgaggcaggggaattatttgaacctgggagacagaggttgcagtgagccgagatcgcgccattgcactccagcctgagcaacaggagcgaaactccgtctcaaaaaaaaaaaagcaatagtgggaggaaattatgtggagaaagtttttgtgttttttgcttcttttcaaagtatggatgagatatgcccaggatggtggtggtagatattgtgattatttctactctcaattctgtagttataatatccagaataagtatggtttgatgagcgtttcaaaacaaccactttggctatcaagtgaaaagtagattgtagagcaacagaagtggcagtaggctaactacaggacttttgcagctcttcagagaagtagtttggatttcatggtagcagtagatgtagagggatataggcaaacttgggatatattttggaagtagagtctgtagtggtactaattaaaatagtcatgtagataaactgtttcttactgtttcaggacaagatgagtctatgccagatgtaagtcaccacactcatttactgatttcttccttgaggattttttgttgttaaaaaatttttgtggttgatctgcattctgtcttaaactctttatttcattgtggattattaacagttggtccacgggccacactttaagcaacgtcaatctctagtatccatcttaggggcaaaccatgatctatttaaccagtctcttactattgggtagatggttaaccctcacatcatcttttttttagtattaggaataagtaacattgccatgaaatgcttgtttctataattatgtgtatatatcttatgctttctttaggataattcctggaaatagagtaaggattttggaacataatgacaaattgttctccattttacacacttgcagagccacatttttaccagtatgaattcttttttcaaaaaaatctttgctaatttggatgacaaatagcaagttgttatatgaatatgtacttatttgattactagtaagaatattttaaatgtattttttggaattgatacatccacctttgccatttttaatgctcttggatcatttttactttggggtgtaagtaccatttacattaaggttatttactctttgtataatgaaaatatttttcctctgttttaaaaatggattttggtatttttgcatcatgtagaaattgtccttttttatagactctcctagcagtatagttacttgggaggtgtagttggtcaagccttgctgcctccctgcttccatctctaaagaggttgccctttggtggtaagggcagttcactattgtgaacttgctggggtaaaaggttttggtgtgaggaacttaggagttaaaaactcttctgtaagggaaatgtatatgagtgatggatgatattaagaggttatttttaaattttgttaggtgtgaaaatggaattgtggttgagtagaaaaatctgcatacacacatagatgtatttaggggtgaaaaatgtgagggattttcttgaaaatactacagtcaaaaagatagacatagcaaatgtatcaacatttaaaaaatttttgatttgagtgatgggtttatgagtgttcttaacacttttaaaattttattttaaagaaatggggtctcgctgtgttgcccaggctggactagaactcctgggctcaaacgatccacgtatgtcagcccctaccgaatagctggcattacaggagcactgtgcttggcttcttaatactattcattatttttgtggggttttttttgttttgttttggagtcagagtttcgctcttgtcacccaggctggtgtgcaatggcatgatcttggctctgcaacctctacctcccaggttcaagtgatcctcctgcctcagcctcccaagtagctgggactacaggcacccaccaccacacctggctaatttttgtatttttagtagagacgaggtttcactatgttggccaggctggtctcaaactcctgacctcaagtgatctgcccaccttggcctcacaaagtgctggaattacaggcatatgagccactatgcgtggccagtgtgtatgtttcgaaaaggctcttgggtctctggagaactttgggggagtttttttttggtttttttttttttttttttttttttttggcttcctgtgactaggattctcttcttagtctctcttctggcactttgcaggccgggtggttggtgatctacattacaaatggagccaccagtaaagtcagaaatgagtcaaagaaggaggtttatggttgcccctttatttaaatgatcatggtcattggcaaataataggtattctttcttaggcacaagattactaatcttctcaattctctgtctgtgtttattttttatgtgatctgtctgccaaagaaggagagtagtgttttgaagtccttcagtcacagttgtggttttggcgagtttttcctcatacttctcacagctctgggcattaagaaaacaacaagggcccggcgcagtggctcatgcctgtaatcccagcactttgggaagccaaggcgggtggattacctgaggtcaggagtttgagaccagcctggccaacacggcgaaaccctgtctctactaaaaatacaaaagttagccgggcatggtggcgcgtgcctgtaatcccagctacttggcaggctgaggcacgggaagtgcttgaacacgggaggtggaggttgcagtgagccaaaattgtaccactgcactctagcctgagcgagactgtgtctcaaaacaaacaaacaaaacaacaacaaaaagtttttttaattttgaaataattttagacttagagaaaatttaccaaaaaaagtacaaagaattcctgcgtagtctctacccagattgcccaaatgttactaatattttaccatgggcttctatttattgcctgtatgtatccatattattattattttcttaatcatttaaagtaagttgcatacccgatgcccctttacatcccttcagtgtgttaattcctaaaaataaggacattctctattatcaatactgttaccaagatcatcaaattaacattgttacagtattgttagtaccacagaccttattcatgttgtcccactaatttcctttgtagctgctatggtctcaatgttcgtattctcccaaaattcttgttgaaacctaatcactaatgcaatggtattaagaggtggggcctttgggagatgattaggtcatgggggcagagaccttgtaaatgggattagttcccttaaaaaagaagattgagggagcttgttctcctgtccgccttgtaagaacacatagcaggtgccatctatgaagagtaggccctcaccagacactgatcttggacctcccaccctccagaactgtgagaaataaatttctgtttataaattgtccaagcctggtgtggtggctcacacctgtagtctcagcaatttgggaagctgaggtgggaggattgcttgaagccaggagttcaagaccagcctaggtgacataatgtgaccccgtctctaaagacaaattaaaaatttagctgggcatggtggcctttgcccgtagtcctagctactggggttgggggtggtggtagtgcagaggtgggaggattgcttgtgcccaggaattcaaggatgcagtgagctatgatcgtgccactgcactccagcctaggcaactgagcagtaccctggctcttaaaaaaaaaaagttacctagtctaaggtattttgttatagcagctcaaactgactaagacaacagcagaagaaaaaaaaatactgttactttctgatctcatatccaatccaggatcacacattaaattatcatgtctctctagtcttcagcctgaggcaattcttaagtacctgtccattgagatctagatgtttttgaagagtacggaacagttattttgtaggattttccttatgtttgctttgtctcctgttttcttgtgatagattcaggctgtgcacgtttggcgggaataccacaaaagggaggttgcgtgtcctccttactgcatcatatcagaaggcacattccatctgtttgttccattactggtgattttcactgtgatcacttaaggtggtgcctgccaggtttccttagtattttctgctttgaaatgaataaatatcttatggggaagtattttaagactatatacaaattctcttaatcattaagctttcaccaactagttttaacattcattggtcatttttgtctgaaatagctaataccacggatagttgccaaatggtgaattttaactcatgggtagcatgttttgacagcttgttattcagccatttggggtttgtcttagttcttttcagctgagatgtacagcagctttgtagaaaagggcagctagatctcagcattggtccaaagacatgggtgcttcacattttgttatatctgtttggacaggacctggatgggtcgagttctcacccatgctggacggggcaccctgcctctgcctgtctgctcttctctagctctagcaccagtccacccaggcagctttgtctgggtattggaagtgtttttttttttttttttgtaatgtctgacatagatcatattaactagaataaaccaggcaaggcggcatttttcagaaggggctatggcatggtagtgtcatatatatgcaaaatttttttttttttttttgagatggagtcttgttctgtcacccctgtcgcccaggctggggtgcagtggcgtgatctcagctcactgcaacctctgcctcccgggttgaagcaattctcctgccccagcctccggagtagctgggattacaggtgcatgccaccacacctggctattttttttttgtatttttggtagagacagggtttcaccatgttggccaggctagtttcgaactcctgacctctgatgatctgcccaccttggcctccctaagtgctgggattacaggcgtgagccaccggacctagccagatttatatctaatgggatcaagagaatatttattttgttgaatggaagatgaagatatatgaacatgtttacatgctaaagggacagagtcagtaggagagattaacgatcaagacagaggggactgttaagggagtttccctgaaaaggtagacctaggtaatggggttagctcttggcaagagaacggacactcaggaggaagttggaaggaatgaagggaagggaacagtactgtttttcaggttatgagtaggcaaacatttgaaggagttgttccctaattgcctcattttgctttgtgaaataggagtgagattatgtcctaagagttagcaggtacacgtcttgaggacgtcgctgaatagggaaagtgttgtggggaataagagcattgtctggggttcaccaaaggatttctaggcttctggtggtagagaccatgaattcttggtggcctcagtctgcaaggctctgttatttttctcccgcagtggttatcagctcaggtggagaagcataggaaataattgggttggttggggatggggctttgccacatattgtggtgggaaggccagggaggtaggagaacagagagtgggacaagagggttggactttgtttggagacgtggtttatgactccatggtggtctatacagaactggggaggtgggattggagagagggtaaaagagtgaatgtcttgagaaggtcagagaattattggaggaggaattaggttcaagattgctagcagcataggaatattagagagtagaatattggagtttagcattttcatcatgggacagttctggctgatgaggggctggagtggagcagggtaaggtgaagatcactgggttgtgagaaaacttgaaattggtggatgggttatttatgtggacattgacaccaccaggttgatgggaggacattggtggaggggggatgacagtgttccaagtgttcagggaaggagggagagttgagcaggaatgaagtattgaggccagatggcatgaacacacttaaaagatggcattttggttgccaagggatcagggatggtttggacctggaggtttggtggaactggctgtccacagcctccaaagatgtcttgatgctacgaagagtggaatttgctcagatttccaaaaaaaagttggtcattgggcctttgcttgtatttcttcttcctgtagctcccttgcctaccttctctacctggctaactcctgctggccctttaagactgagctctgagatcacctcttccgggaaatctttcttgaaccctctgatccgtctatctgtccctatgttccttatgcttatctctaacttagcaggtatcataccatatcatcgtctgctgtccttccctcccctagaccataacttccttgatgaaagcagggactgtatctttgcatccctggcacagtacctggcatatatttggttgaactatatgaaattgccatttaagaagtgaatttggtctagtttgtaatttctctccttaataggtgactttcttttgtcagctcatcttgaatctttttctgaagttacaagcccctttcttagtttggccttagccaagttccatgcaggttgtttctcttttagtgaccaactaatttctatgtgggccagtcagtctttcatcttgcttaggctttttttttttcttttcaccctctattactcctactgcgtaggctttttgttacattaacttcccttttgcttttctctaccctcagcagagggggtcaaaagaaacttctttgttcttagtcttccttagctgcccaaaatttcccagtagtttgcccatgcatttcattcccctattgactcttactgagtgacctatgtgccaggcaaaaattcggacttgttcattctagtttctctgcttctagtgtgtctcatgctggtgtttgttggctcagatgtgttaatggggctgccgctgctgttgtggttgttagtcattcttttgaacagcggctttagcttaccaatgctccagatacagtttttcagaaactcaatgatctgtgtgcattacacattaaaaagtgcattgaacaacagcatatccagattaaaaacaaacaaattagatttatctggtgtttttccattatgggttggagcaaacatgctgtgtataaatcagataaaccttttctttcactgtttcagactgagaattgtttgttcttgcttttgtggtcaccaagaatgtaatataactatgctcttcacatcctaaggccaccataagtcctggatcagacctgtttttttgaagtcacctgaattttgacttgaggctcccccaacccttactcccactacccctttgaactggatcactttgcttttaaggggcactcccttgaagccagttccctgaagtgacctactttcttgaggtgcttgaagagcttccctttcatttgggaggcttcctcagtgcccccattcccaggcgttttttcctgggagtcctgtcctattcatgaatttcctgttttttccaggggggtgggtagggggtgtgggggcaggcagtactatgttattatcgtaactagtgacatttaaagaaagaaacccaaagcccagttaaccaattacacttaaattctctgggcccaggcctgctggatgctctccatctaccagaaatgcttcttatcatcccccctcttttttagactgctaatccttaacagattaatctgagtttatatttagatgaaagttattcattaatagaaaaacctgaaactgtagtgagggctgacagtgttgaagtggatagaggtacataggccacctttagaccaaaaagtctttgtaaggcactggagtctttaagtgtctgctttggcacaaggacatcaggttatccttaggaagccaggaacaccttgagactcgggccagaacaatgtggcccacctttgagcttcaggtttggtcccagtgagtctcacgcctttttgatgctgaccatatatatggggcaaaacactctgtaatctgctttaccccactacacccatcccatccatccctagttgcaaaaatttcaacttgtatgaatatgcacagattcaatagtggaaactcagcactgttgagtgccaggcttcaaatatggaattagtgacctctgaacccgtgtttgtcaaactgcctgctaatgggtcatgacatcagtttagcagattatgcctagcactattgttccagttaaattgctgtgaaacaaaccaccccaaacttagtgacattaaacagtaaccgtttattatgctcatggattctgtggctcaggaattggacagggtacaatgggaggtggcttgtctttgttccatgatggctgggggttgggatcatttggaggctcttttactccacatctgatgtctgggctggggtgccttgaaggctagtggaatcagctgggaccaatgaccagaacacctacatgtagactctccatgtggtctgggcttctcacagtgtggtggctgggttccaagagagaggttccccagaggaagcatttagagagccagtgttccaaaagaacaaggacatttgataaccttgcctctgaagttacatggcatcacttctgttccggatttgtggatgctatctcaagcctgcacagattcaagggaggtggagatagagagatggagatctatatccccatctctcaatgggtagagagtcaaaagatttgtggctgtttttaaaactactacaagttcattttaaaacaagatagatgcttgagcccaaaagtttgaggctgcagtgaactgtgatcataccactgcattccagcctggccctgtctcaaaacaaaaaacaaaacaaaacaaaaaaactaaatttaaaaaataaaacaagttagaatatagaacaacagagtgcctcatgtagtcaaaaaaggcattgtgaaacttgtgtttcagttatgtgtgtctgtgtgttctggtttatgaggtaacgtttttctttctgtggtctacaaaaacattttttaaaacactgcttaactgtagtaacatctaatttggtttatgaacaccaaattttatctcttaatacctcagttaataggttactattgtgtggttctttgttataaagatgagaacctaaggaattgattgtcctttgcctgtaagaacaaaaagtcctttgggacctgttttctttgccctccaggactccctgaaggccttgttggactgtggaccagacttggagagtcagtgtgctgcagaatgggctgtggtctgggccaggagtcaaaacttccttaaagttttagtccaatctttgccagtcagtttcctagagtagcaaacaaatgtgaaatgaagaggacatacttctttttagagacagtcagaaaatatttagccatctggaagcccaagaactattcataataataaagagacagctacctcgcctgagcaaggtggtgtctgtggtaaagcaatctcaggaaaggctttctaccttcagtgttgaaatcaaaaggaaatactgagattggggtctgcaagaaaagacatgctatgtgtgttgccaaaacaatctgccttcctccccttgctgtgacttactgcgtttagttattcctaccctttcaaggaaatgtgcaaagatgactgagcaatggcatttactgtcatcttataaaacactgcattgcaaaacaatttttgggaatagtgcgattaaatggtaaattttgctcacgtatgttaggaaatttacacaattctgtgcttttatttcttcttattaaaatgagacatgtttattctagaaaactagaaaatacagataactgttattttaccacgtagaggagggtattatttaccactgatttttttttggttgcatatccttcctgtcatttttctgatatgtatacattttaaaaaacaaatgggctgttgcagtacactgttctgaaatctactttttaaacttagatgaacacattccatgtcaattaatgtacttctattataaaaacttcatagtgttacattgtatagagatagtatttgaacgcttaacgttgctggcaacatttaactgtggtaaacgatgctgtggtgaacatctattaatatataactaaatcttttttgtaatcatgattcctaaaattttttaaaaatcttttttgaatatatatgtacatggtacacaatgttatgattttccttaggagatacctatgtaatttgatctgctaaatcacagagcatgaacctattttatttattattttattagagacagagtcttgctcttatcactcaggctggagtgtagtggtgtgattatagctcactgcagcctggaactcctgggctcaaatgatcctccctcctaagcctcacaagtagctgggactacaggtgtgtgccggcacaactggctaattattttattttttgtagagacaagatcttgctttgttgcccaggctggtcttgagctcctggcctcaagtgatcctccttcctcagcctcgccaagtgctgggattacaggtgtgagccaccacgcccgcccagcatggacattttgaaaacaaaaaatttttgtgctgctaaattgtccttcccaaatgtaccagtttatactcctacaaaagtgttatctattccttgtatttcgcaatttgatagagaaaaaagtcacttgctttcttagttgggtgatttatttgcattttaacttctttagcattttacctctgaaaatcttgcctgttttttaatcctcatctcaaatacctcccacccgacccctcccgagcacctcccagcacaatgaagacttcccatctgctctgtcttgtggatttttcttgtcctttccaatcacctgtggtttacttgagagcattaagcactgtgtctaactcactttttaatcttcttttgcatgcagcatatttcattgcatatgtttaagactcagtaaatattgagttaaattgcagtccaacaaaaaggattgatggcagcacaaagtaatctgtcgagagagagaaatgtaaagaaaagaaatgttcgtcaagctgaagaccatgtgaagctactttggagagggcatttagtatttcatttaggaattcttatttgcctgtagtaaaaaaagaaaggcctctccttttttttgaaccatttttatttatagctaatacttccattaggcagcccagccctgaaattcttgtttaataatagccgatgttttgtcaatattcttatgttaaccgtaggtagtaggatcctctgaagccaggactatttttttaatgacccaacttattgttaaaatatattttctcaataagttagtgttggctaccgtcggaaacttacatctctttcctgttttcaatgcctttcccttctgccattgtatttggttcagaccccttcagatctgttttgtcctcacgggtcttttttttttttttaatgactttatttaaacttggagcatcagtcacaaatttgcagagacaatgctattttctactgaaggcttttgtctgagcttattacctctcttatgtttgccttatatccatcttcttcccaaatatacattttacttctatttatttcttttctacatgaatttgtatatatgtggcgctgagtgaaattacaagaaaatgcaatggtaacacacagtttataaaaccctggagatagaaacattttctggtgcctgacactgctggactggacccttttctgaagctgcacattctgccattattcatctctgagtgttagatggtatcagttaggacccttcagctgcaactaacagcattcagaactaaaaagcaacttacttttctcacataagaagtctagagtctggaagtcaagtgtcactcatatgacaatgtctaaggcaggtgggaagggggacactcttttaactgggagaaagaagtctccacctctccccagcgggcttcccctcaggtcccactgaccaggggttctgtgtgcgtctgctctgttctaaagagggttgcagaaggaacatctagtggcttccactgctgtcaagggaaaaatgatgttgagaatgtgaccaacaggtgctgttagaggcataattctcacttgcattgagctccaacctccctttggttacttccataggtcagctctagctgtactctaaattagagtcccacaaccattttatttctctttctttttgtaaattcctagaagtgttgaaaacagagggtatgattctgcctgagttttgtctcctgcttgtggaatatcttcagttcctggaacctgaggttgtgtcttgcccccgtagcctccattgaatctggcccagtttggtatgatctcctagccacagcctctttgtctcccagccacagtcactagtttccttttcctgtgagaagtgagaattagtcactcacttccagtgctaagcataatcagagtgaggaatgtaggagcagctctaaaaacctgagagctattggtgtctggaattagttttattgtttttacctggtatttgttcctgggcacttaagtgcttgcctggctgcagcactgttaattgatgagacccaactaggccctctgtcatctgaccctgacccctctgcagcctcatctactgtggaatcctccatttcaaccatacttagtcatttactattccttaacatgcttggtggcttcacacttccatgcctttttgcacataatattttctctttctagaatgttcatgtccctcttcttatctggcagagccctacttttccttcaagatttaacctcagcaggcatcactccactcctttggaaaacttttgtgatttttcccttggacagagttaatcagttacttttcagtcacactctctacaagttcctgttgttaaacattcacaaagtgttgtaattatctgtttatatttttatatccttctatatttagcttctggaagatgggatttatgtttttatttctataacatcagtactcagtatacgtttagcgcataaaaggtgctttgtaaatgttgaaatgaataaatgacaattttacatctaaacctgctgattaataccaacttcatatccttcttgtaagaaatctgtatatattagaagattataaattataaaatacacaagctactatgttatctaaaactgaatctgatagcccatcacatttcttatttggcagactagactgaggcctggagtggataagtgactagcctaggccacataatgatgagaggcagagataagactagacttctatgtctttgtctctcacatagcttgtcttgtagtttctataacaccatcttaccagataggtgagggagatttgggattagcatcatctgtgtgccgtcaaaaaccctgccattgctctcctcgcctgtatgcttttgttcacgtggacctttggctctctgcttgcctgagtcctgccctgttgctccagacctaccctgattcttgccttttctgaccatctcagtcagaatcacttaaaccatcttctgagtttccatagctgtttatagcacacgcagcaataccatgcagtgactgagtacagccctcagtccacacccctgcttcctagctgtgtgactgacaagtagattaacctctctgtttccaaatctataattaggaataataataacagttcctactttatagagttgatgtgtgaggattaagatgttctgtggtacatagtaaacatccaaatgttacatgctgttattggtggtgacggcctgattactattcataaatcgctagaggctgattactggctgcctctagtttcagctcttcctgtgtctgactgcttattgctgaatccagggttgcccagttttgtaaggggtatatcctaacctgcaggttaccctcagacacttgttggaatatttttgcgaataacattcacttaggagttttgttccctggcacacaccagtgctttgtcatgtagaggttcgctcatttgtataggtgatgttactttgaaaaagttgtctctaaggtctgctcagtgaaagaacaggatgttttctctctttacttcacagccatagccagctttgaggttcagtgtttgtatagctctaagtctctgttaattaaggaaatggactagaaaagacagtttaatgaaaactcacagacagtagacaatttgcacacattccattgtttgacaccatagtagaagctcacctctagatgtaaaggagcagtctgtaattctcttgacccttttcctgattaataacctgtagatattgtccatccatggtataagagttggatagttttgtttggattttctctatcttgtaaatgagaaaccagggaaagaaaatacagtgtatttattatactgggaacaaaggtcatggaaacagtaacttttaaaaagaacccttggttacctagtttttaaagacctagacttccttgttctatttctaaaagtctgtggaataaacccctcattttctctgatttacaaggaaactaaaatgtggaaaatttgatctttaaggggcatgacttctggtttatgggattgtttattttaaagtttaaacatttcagtgtcttatgatactcttagttaaaaggaagttctcttgagtatcatataactattaaaattataatttagatctgtattttcaagaaaatactcagttttaagtggaaaaatgcatgggaaaaggtcaatttaaatgcattttaaaaaatcaaagaatatgtgcttatgttaataaggattactttagggtaatgagatttcgggtaatcactttttacttttttcctctgcagcctttctatattgtctggattttggagtgaccatgtgttactccatattcaaaaaaattttttaagccattttgtttatggaggaaaaaagtgcaacttaagatttgaacatggtaaagtcagcctttttctatcttccccagggaagttatccccagcagctaggagagaaagaaacagaaatgaaaactccatctttgaagaaattgggagatatctgaaaccccaaaccagaaaatgagtagaataagttcttcaaagattgaaccagggtatgagaggaagtagactgaaggcacttgggactacagatctcaggaaaagagagagacattttccaacgtaagggacacaccctgggattcaaaaccaaatgcttcatttgaaatagtggaaatgagcacacaagctgatggcaggagcttccctgcagttagtttgattccaggatgcagaagaggctggattgaatgaggacttagacaagtagtacttgtagggagaggtctgaccttgtagcaggaaggagagactacactgtgaacagctccacagctgccttttgcttttggttgatgggggagagaggctcaagaataccttccccaaccctgtgtgcatatatacacacaggcttgcaagtaaaagaaagaagacttctactctcctgaatatggccctggctcctctcccaaatgaatcttcaaatagctggtccaagccaggcgtggtggctcacacttgtaatcccagcactttgggagactgagatgggcagatcacttgaggtcaggagctcgagactagcctggccaatatggtgaaaccccgtctctactaaaaatacaaaaattagctgggcgtggtggcgggcgcctgtaatcccagctgttcgggaggctgaggcaggagaatcgcttgaacctgggaggcagaggttgcagtgagccaagattgtgccgctgcactccagcctgggcgatagagcaagacgtggtctcaaaaaaagaaaaacaaaaacacaaaaattccctaaagaaggaaacaaatagtggagaaaacaaaagttttgtagtacaaatcaagaagtttccagaaataagagaaagcttgaatctacagtttgaaaagacacactgtgttctggaaaaattaacatagagtggccagccttgcaacatctcccagtagggttattagattttaaatgtaaagaatcattcaggcagccaggccaaaagatcaagtcacttagtaaaggagaaattttgactcctccgtattattaacgatcatgggaggacactggagcaacagtgagaaactccgtaaggaaagtcagtgtgactcaaggattttatattcaatgaaattgttttttaaatataaaaacaacaaatgcatttttctatgttagaaatcaagaaagaatattctcgtgaacgcttcttggaatctagtcgaagataaacttcagtccaccaagagataactggaaaaactacagcaaagtagatggcaatgagtgttgaccctctaactgtaggttaaaacaaatgtggagattgatacagtagaacagaatgtaaaggttatatgacctgacggtgtgtggtcatataactaaccacctgtgggaggagaggggaaagaagattgtaggtaaagtaagagtgctgttccctcatcgttaatagctaaggttcaaagggtaccatgtaaagctgacaatgaactaatagaggtatagggtctatttacagctacaaagctaaacagtaagagttaatataactgactaaaataggttagcaaaagaatggtgcaggagaagaaaatattttatttatttagttttactaattttagagacagggtctcactatgttgcctaggctggtcttgaactcctcctgggttcaagtgaacctctcaccttggcttcccaaagtgttgggattacaggcatgagccatgaaacctggcccagaaatattttaatttcatcattttcatgggggttaaatagatactatctaaataaataaaggttgatagatatttataaataagtgaccattagacaaaatatcagttatcttaaatatcaaaatacatgcacaaaggaaagtagcctctacaaggggtaacagaaacaatggacagatacctgacataccaataaatataaatgggagttggggttacaacagtcttggtcatcaagaagtcggaccttatattccactaatatgtttctctgagcaactcaaaacctggtatttcagaagctttggggtcagcaggagcaggacctcacctctgggtatttccttttttttttttttttttttttttttttgagacagtgtttccctcttgtcacccaggctggagtgcaatggcacaatctcagctcactgcaacctccgcctaccaggttcaaccgattctcctgcctcagcctcccaagtagcttggattacaggcgcccgccaccacgcccagctaattttttgtatttttagtagagatggggtttcaacatgttagccaggctggtctcaagctcctgacctcaggtgatccgcccacctcggcctccctaagtgctgggattacaggcgtgagccaccgcgccgggccctgagtattaactttaaagtgattttctttttccactcagccaactatagtgaaggtacttagtgttttgtttaaggtgattagtttcactcctctgaaaaaattaaaaattcaaaactaataaataaatgaatgaaactaaaaaaggaaagaccaaattattatttattttgaatagttatgttggagtttttgatggaagttcttttctcaagagctattctcaaggaccaggaaaatatattttgtttttggaagttcttggaatataaacagaccaactttctgaagtgtcataatatgtggtcccctaatatgtgtatttaatgttctcctttgtttcaccctcagaaccaaagctgccttcattccttggtttcatggaaatagtgtgcatatgtaacagacaataatagcacacatggagattctagtttaaatgacatctagcagttgctaatgccacctttccaaattttcagcagatctgaggttgaaactgacaacaccaaaaaacagtcctagtggggcacatatttagaagttatggaactggattgaaaaacatattttaaaacaggaatatcacccttggcaatttgatagaaaatgggaagacttaactgccttcctcatggtccactcctcattaaccctggcagccatccaaattcctctgtttatgtggatgctacttttaacagcagtcaggtactgcattccctgtcttcttcctgcttcctcttggtactactctattctacatcaattcaaagaccctggctgccagcatatatctgagcagtgaatgtgatgctgtctcagaggctcccatgattaaaatgggggcataaacaggaaacaccccagtagttgaccgtgttagagacattgaaggacagagtacatacgccaggaagcagagccactttattcctaaagcctagtggacttgaacctgtatacatcaacccttccctcccaccaaacaaaacattagtgctcagagagtaaagctatgagcccacatacactttggctatgggcagatgcaggatccaggtagaatgttgacctggggtcattcttaaggagttcctgcccaagatgttagctcatcaggctgagaggactccagcagtaaaggttgtgggatctatactttggtagaaaaggagaaaggaccaagaaaagccagctgaggcactgcctcagctgcccatctaaaggaagttgcagcaggagggacacagtagaagaatctctagagacatcacaaaaatgcttttttagagaaagagctttaaacatccatcaggccccaagaatgagaagtcgtcttctaacagcactggtcagggacttctctgaccctttcctgtcctccctgcctcagaaacagcagctagcagattggggaggaagtgagggagatagaacagtccccacccccagcttcttccccagtggcaggctgcccctgcaactggtcctgctattagagagaggtcttttcttcaaatgaaggttgcagtgctcttaagatactggactaattttttttttttttttggagacggagtttctctcttgtcgcccaggctggagtgcaatggcgcaatcttggctcactgcaacctctccctcccgggttcaagggattcccttgcctcagcctcccaagtagctgggattacaggtgcccacgaccacgcccagctaattttgtatttttagtagagacagggtttctctatgttggtcacactggtctcaaactcccaacctcaggtgatctgcccgcctctgcctcccgaagtgctgggattacaggcgtgagccacagcacccagcctgatcactttctttttgcaaatgtaaccatccagattaaaaaagagcattccaggaccccatgagatgcccttgtattcccttttgattacctctcaccccacaaaatatactatagattagttttgcctgatttgaactttatttaaattgatcatttttaattactgaactgagccttaattataatgtgaaatgagcagaaagatatttcaaaatgtttcatgatggttctttatggccagtatttttgtatatcctgtagaaatatgtcattccctttattttcaaacctcatttgtgagattttagggatacgaatgcctttttgggactggtgtggctgtgttcttcttattaattattactgaagtaaagaggaaatgatatcagcagatgtgcagagcttttatttgcactgaatacactattcatttagacaaaaagatcatttctcaattcaaatcagaatattctaatttaaggctgaaatcagttgtgtcataatctctatggaaacaaagctttctactgtgtagtagttgcataagtaactcatttccccttgtagatatacaaattgtagatgcaaacacttctttttccattttctcccaacaatactcttgaaatagaagatactttagtcatatttgttacgttttacaaaatttaaaatatctgttcaaatttcctgctgacatacattttaataaaattgttaaaacttaaaaattgttgatgagctcactttcttttgctagttgaattcagaaaaagaagattgagttatccttcttagctcttgcgtattagtgtcatctaactctgcaaggctctctccaattggggggtgtgtgtgtgtgtgtgtgtgtgtgtgtgtgtgtgtgttttactaatctgcaggcattcttcgtatattgtgggtatgagctctttgtcagttttacgttttgcagatactttctccaacttcgtggcttactttttcattcctttacatgggtcttttgatgacccaaagttcttaattttgaaatctaacttatcagtcttttcctttatgattagtgcttttcgtatctggttaagaaatctttgcctcaatgaaagcaaaaatagaaaaatgaaattgcatcaaactaaaaagcttctgtactcggcaaaggaaacaattagcagcatggagagacaagctgcagactgggagaaaagatttgcaaatcacacatcagataaggggccaatatccaaaatatataagaaccgcaaactactaataacaagaaaacacgtaacttaaaaaatggccaaaggacctgaatagacatttctcagaagatatacagatggctaacagataaatggaaaaaaatgctcaacacctctaatcatcagagaaatgcaaattaaaccataatgaaatatatcacctcatacctttggattggctgttatcaaaaaggtgaaagataaggctgaggccggtggctcacacctgtaatcccagcactttgggagactgaggcaggcagatcacctgaggttaggagtttgagaccagcctgaccaacatggagaaaccccgtctctactaaagatacaaaattagccaggcgtggtggttcatgcctgtaatcctagctacttgggaggctgaggcaggagaattgcttgaactcgggaggcagaggttgcagtgagccgagattgtgccattgcactccagccttagtaacaagagcgaaactccatctcaagaaaaaaaaaaaaaagaaaagagtgggtacagtggctcatgcctataagcccatcactttgggaggctgagacgggaggatcgcttgagctcaggagttccagaccagcctgagcaacctagtaagacctcatttctatagaacacaaagtaaaaattagctaggaatagtggcacatgcctgtagtcccagctacttgggaatctgaggtgggaggattgcttgagcccgggaggttgagactgcagtgagctgtgatcgcaccactgtctcccagcctgggtgacagagtgagatcttgtctaaaaaaaaaaaaagatggaaaataaacgttggtgaggatgtggaggagagaagggaacttcacacgctgttagtagtattgtaaatatatacagtcactttggaaaacagtatggaggttcctaaaaaaaaaactaaaaatagacttagcatgccatctagcaatcccacttctgagtgtatatccaaaggaattgaagtcagtgtgttgaagagatgtctgtctgtactcctgtgttcgttgcagttttattcacaacagccaagatgtagaaacaatcgatgtgctgatccacagacaaatggattaaaaaatgcaatatatacatgcagtggaatactattcagcctgtcatttgtgacaacatggataaacttagaggactttctgctaagtcaaataagccaggcacagagagacaaataccctatgatttcacttatgtggaatatacaaaagttgaacttagaagtaaagagtagaatgataattaccagaggctggagggtaggggagtggtagatgggaaaagaggatacactggtcagagggcacaaagtttcatttagataggaggaataagttctggtggttcattgtatagcaaggagattgcagttaataataatgtatatttcaaaatagctaagagatagcattttaaatgttctcaccataaagaaatgataaatatttggggtgatggatatgttaaagaaaaaaaagaaaaagaagctgagtgtgatggtgtgcgcctatagtcctagctacttgggaggctgaggcaggaggatcacttgagcccaggagttccaggccagcctgggcaatatagcaagacctcttctcaactcctgacctcaggtgatctgcccaccttggcgcctcccaaagtgctgggattacggcgtgagccaccatgcccagccaagacctcttctctaaaaaaaaaaaaaaaaaaaagaaaagaaaagaaaaaacatttttgccttaagtctcctctttttgttttatttctgattatgtacacccttttcctttctgtcttctctaggcacctgttctagtgtgtttaatgtatgtagttttgtttttctgtgttcatttaaagtatatattgttatgtgcttatgtattttttttttttttttgagacggagtctgggtctgtcgtccaggcaggagtgcagtggtgcaatcttggctcactgcaagctctgcctcccgggttcacgccattctcctgactcagcctcctgagtagttgggactacaggcgcccaccatcatacccggctaatgtttctatttttagtagagacagggtttcaccgtgttagccaggatggtctcgatctcctgaccttgtgatccgcctgccttggcctcccaaaatgctgggattacaggcgtgaaccaccacacccggccttgcttatgtatttttaatttatgtaaatggtattgtattgtagatctcattgtctttatttttttaatttggcatgtttttaagattcatcatattattatcccctagttagatatactgagaatgctcgtaaccccctgccaccacacataaccctagacagacatcttttcatatgtccccttacagatctttgtgaataggcccaggctcatcacttctgggttgtagggtaatgcaagtgcaggcattttaggccaaacctcagtaattggttcctgaacatcagatgctatacatgaaaatgtcaaccagaagcaatttcttgttacttttaatgggaaaaaatacgattcattacaagtcaactcaaccccaaacctatttcctacagcatgactgaaacttagtaaagtagtagtctagtctggtaggatgtaaaatgcttaaaacatcattttctgttatcagacattgcttattagcaagtgtttgctttgaacgcaccaacaagaaccgtttgcctgctctctcgtgacctgccataggaaggccaagagcagccccacagaggatggtgctggatgtcctctgcaccagcagctgtggagatgcacatcctctttgacagtctgtgcttttcaaaatgtttatgcacttatgactactacgatgttctaacaagtgtatttggattataatttgagactttccgcccaccattttgttaaaaatgtattcattttggggcacataaatacacatttttttcttatataaacaccagacaacttctggtcaagattttgcctttaaacccttaggaagatgcacccctaggaagagacggtctcccttacaagaggtttaggtttcctaaaccttcagcctgggctgttgctgctatttgcaatgaaggggcaggcgatgattgtccaaggctggggcctcacctccatccccatcctaatgtcccccatccttgatctgaaggccttcatctgccccaggagttctcacattctttgttgatgttgttagttcctttactatatacttacctctcgttccagtagtttctcctctgaaaccccaagttccgttttcttttgaacgtaagcaaatgacttccttgatttttctgagatgattatttgaaatttagaattagacataattagtagtaaaattccaaaaagaaactttaaagaaaccaattttttttttttaataaaaaatagtataggccagttgctagttgctgagatacttgtatagccctcttaaaagaagactcagaggtttgttttttgtttttttgttttttgttttgaggggacagggtcttgttctgtcacccaggctggagtgcagtggtgcaataatagctcactgcagcctcaaactccttggctcaattgatcctctcacttcagcctctctggtcttagactacaggtatgtaccaccgtgcccagctaattttttgtagagacagcatctcgctatggctggtcttgaactcctgggctcaagtgatgctcctgcctcagcctctcaaagtgttgagattacaagcatgagccaccatgcccagccaagagatggttttaacagtacagcctcaggttgaggacagcattcagaaggtccgatggtttaatacaagaaggaggctggggttaacaatttactctttgttgcagatttttttcagatagctttcagtctcaaaactcactttctacccaaagctatgacagagatagcatgtttagcttccctacctggtcaaggatgccttctttgttctagaaccaaagtaggggctttatgaatggttgtgcatccacttccagtagtaatggctatacattatggagcacttaactgtgtggcgggtactgcacagagtgcttcatatctgttactcatttaatcttcacaatcactattttccaagtgaagcttagcaaagtgaagaaactcacagtttttcagaaagggtcacagttcaaaccccatatctgtctaacctccagaatacgggttatgggaactgtgggtgattctagataattcgattgtgtggattgtcattctcattgtaatctccttaaatctcattaaagctcattagccaacccaataaaacctaggctggcctttgcagtcaggatgctagtagtgatcaggtatgcaggcaaacagctgtagaacctccagacaaggctctctgtctgaatatacagtgtgttacagaaacatgattgacaaatgtaaatattcctgaaatagattcatctgagagagaggcatgctgctaatttgttaatcaattgatttggtatccatatcacccatgcctgctgaattcagtttttctttagaagggagttaaataaatagcactgagttctcaacctttggctccctgctccctggggcagcctgtagaccccccttttcattctgacagatgaataggcaagtgatcagttttgtcttttgggagggtggagggaagaggtagattctagtctggcctccatgattttatacctcagattgccacattggatttgaggatcctcagatctcagtgacatgtttgaagaagatctcggattgggttatctctcctatagttgactattctcatttttctatgggttaattcttactagttttactttcaaaggtaattttaacatttcgggaaaacttacatttgtcccctgtatttaatacgttaatacgatatttaagaactagatcctactttgtacagtatttcaaggtatcatgaaattaatggttttttgtttgtttgtttgtttgtttgtttgtttttttgaggcagggtcttactctgtcgcccaggctggagtgcagtcgtgtgatcttggcacactgcaacctctgcctcccgggttcaggtgattctcctgcctcagcctcctgagtagctgggactacaggtgcccaccaccacgccaagctaatttttggtatttttagtagagacagggtttcaccatattggccaggctggtctcgaactcctgaccttgtgatccacccaccttggcctcccaaagtgctgggattacaggcgtgaggcaccacacccagccagtgtgttctgaaagaaatagtgctttggaaaaatacagtttaaaaaaatgccttgtaatatgtatgtgcattatagaattataatttcatagcaaaagcttcttggaaaatatttgctgtagatatttagaatttattgggcatttactcattgtcaggcattgtggtaactacttgaaatagcttatttaatctggatatcattttttgcccaacactacgggtttgggaaaaaaggatgtgcatgatttcaccccagtatataactagaatttgcaatcagtcagggtaacatacacaaggttcacagtaaatatttactgtttaaatcgactgatgggaaaatcaggaacaggtagggggaggaaagagactatgacagtgggggacagataaagagtctgggagaagaaccagggaaagcagctgagaactttgcctcaagagtagaccttggtgccatcttgtgggtggatctggaaaggaccaagcagatgcacatcagttgctactaagatgccttgcagagccccaaatttccatgccacaatgatagaaaactgcaaatcagataatcagaactctggtctaggaatcagtggatcttagtgatggaatcagtgtcctgtccatcagcaagtcctgatcactctctccaaaacacatcctaaatctgtttatctctgtggccggccccaggccaagccaccatcttctcttgtttggactactgcagaagcttccttattggccttgcctctactctcatcctcccgtagttcattctccattggcagccaaagacatcttttttagaaagaagaatcagattatgtcacttctttgtataaaacctttaagcggcttttcatgaaatttagaataaaattcaaatgtcttgtcctgccttagaaaactctgcatcgtatgacccctgcttagctgtaacttcatctcatgaccttctttgtatggcccctgcttagctgtaacctcatctcttgaccttcttcctctttgtttcctccagtgtcccaccttatttccactgtaggtcctgtgcactagctgttcctctgcctggtactccttcctccacctcttgcatggttggctacttcctgtcattcagatctcacctcctgcattgctgcctcagaggggccttccttgactctgattcagttactctccatcacatctttccctgttgttaatcagagatattgtctgtcttgctgtctattgaatcctcaatgcctaggagaccatttggcacatagtggatgttcagtaaagatctgtcagaaggataaatgctgttttccagtttcttgatctttttccagctagatacagattacggccaggttattttagacttttcctaatagagcatgaaaagatcacaggaattaaattcagacagaactgggtcccattcctgcaactactgcttaccaactatttgaccatacttctctgagtgtcagcttcttcatcaataaaatggagttaatgagcttaccttgctcataaggtaagaactaaattggacttaaatatgattggatccaaagtatttacgtgttagatacttttttctattaaaactgactggaccatgttgttatttgcattttcctctcctgctacccaagggacaggattaggttctttgtactcctagtatctagcactgcacttgtcttacagtaataggtggtccacaagtgtctggatttagactcttccacacctaagaactggtatctcctgactctttccaggctgtgtccctttgatcacattatttctctttgtccagagagagaaacagatggtcactggttgtacatggaaagcctgaagggatagtatggttcagaccaaaattggatttatgtctttactgcagttcctgggttttgtatacaattaatgtaaattgaccccaggataactttctgtttctaataaaaggatgaaggaaaaaaagagatcgatcatatgattgttttgtagttcctaggacttaggctcttcgtaagattcttctttctgtttcttttttttttttttttttttaagacagagtctcgccctgtcacccaggctggagtacagtggctctgtctcagctcagtgcaatctctgcctcccaggttcaatccctcctgagtagctgggattacaggcacccaccacacctggctaatttttgtatttttagtagagacagggttttactatgttggctaggctggtcttgagctcctgacctcaggtgatctgcccgcctcggcctcccaaagtgctgggattacaggcgtgaggcaccacgcccagccattctttctgtttcttaatggaataaagtacctatgaaattactctgaaaactacaagtcctgtattacatacatatatttatgtaataagctggtatgagtataatttctagataaatgattggtttaaaaagattagctgttgactgcacattaattccaaaatattttttgaataccatgtactagacactgttttgggtgttgggaatatagtaatgaataaagcaggtaaatccctgttgttatagaactctgtattccagtgggagaaacagacaaaaaagaagatagataataaaatatgtagtataccaaatggtgattgggagctaagaaataaaaacaaagcaggcaagggatagggagggtagaggggagtagaaattttacagaggttggaattatatatctattttctttctcacccacccctaatcaagatttgtaacataataactttgccttctaataccacatctaaatgatgttagatcagttaggcaaacgaaatcaaaacttctaataatttgtttcatatatctgtaaaccatatttacaaaaagttttacttttcaatattaaaatgcaaatcaacaccatcatattgtctgatatcctaatattataacctttttaaataatcttaatacattcacaaatatttaaaagtataaaagattaagaacgtgtataattactgatatcagctattgaacatacttttgtttctatattgcttaaaaatgtcagttgcttttaaagctgaaagataaaatcaaagctatgctatttaaatttatttgaaatgattattcccttgtaaatattaatgtgaaaaataaattattattaagagggctgtgacctgaaaccttaggtcagtttgattatgatttccatacataaagaaaggatggatacaagaattccagaagttccagtcctcttttctagagcagtcaggaagttgtttactctttgagggcccactgctgacgtctgctcactgagtaatgtcatcagatttcctggtggtggttattttggggggagcagtggcaagtagttgtccggctgttaggagactctgctccatagaggtcctgagagccggatataccccgtagacaggatgtaaggttaaatgcaatctagttaagtaaataaagtaagcgttcagtggtaaaaaggaattgctgaaacatgaatgttttaaaatgatattgctaaaatttttacgtggcaaaattcatagtcttaaatcttttaaaagtgaacccatagctgcctttatttcttaaaataaatccaaaggtgagttacttttataagttcacatcataaatttatgctgtcctttgtctgtacaaatcaagttatttcaccagcttttggtgtagaccacatattcaggattgtttacctaggagggatgagccttttgccctgagctatccagacttttatcttttccctcagcttgtgaccaacactatgtaaatatgtatatacatactttttactcatgctggtcattaatatttaaacaattcattattgtctttatatttattttccttaccggtttccttaagtttgtactgttgattttctcaaacttaatgatttgaaagcttagtgtacttattttgtgacaaaaaggttttagactatagattttgcctctcattataatttagcagtagtatcctgtaagtcttactacataatattcacttttattttccaagttaactgtaggcatagtttgcatatctctctttgattcattacttttgtgagttaatatttttaagttttctaaggaggcaggattttttgttgtcgcttaaacttaagtttttaattcctagtttgcttcgttgaaggataaaaactgtacagtttttactttaggaatatattttaagggtttttttctggtaacctagtatatcatgtttttctaatatttataaatattttctttctttccattcagactttattttttatctatttgatccttcttagtaaatttcatgagtattctgtcagagactgagacaccaattcatataaaggacccaggtggctctctgaccctgctttattgtggcagtagcagcatccctccagtttatgctttttctgctttctcttacgaaactgtgccccatactgtaggacataagcaaaatgattttctttctcttcttcctgtcattttcttcctttcttcttcctgagcagttccactgcattctccaagcaataggtcagtctcattcatttgctcattgctttaaacttgttcattaagtgctggtgccacaaacaaaaaactcatcgttcaaactggtctctcagagcctcttgctttccttcttcctgtaccgtgagagtatgatgattatacagaccatttcaagcacttgaaagttgattttaaaaaataacaaaacaaagccgggcgcggtggctcacgcctataattccagtactttgggaggccaaggcagacagatcacttgaggtcaggagttcgagaccaccctggccaatatggcaaaaccccgtctctactaaaaataacaaaaattagccaggcgtggtggctcatgcctgtagtcctggctactcgggaggctgaggcaggagaattgcttgaatctgggaagtggaggttgcagtgagctgagatcgcgccactgcactctagcctgggcgacagagtgagactccatctcaaaaaataaaaaataaaataaaaaagaaaatgattatacagaccagatgtctccttttttcctgattttaaaaaatatggtaaaatacacataacgtaaaatataccatcttaaccagttttaagtgtacggttgaatggtattaaatacattcataatgttgtgcaactgtgatcaccatctatctccagaactcttttcattttgtaaaactaaaacaatatatcaattaaacaagagcttccccattcttcccttccccttgtccctagcaaacacattctgctttctctctatatattttgactactccaagtacctcatgtaagtggaatcatatagaatttgtctttttgtgactggcttatttcacttagcataatgttcttacagttcatctgttccatagcatatatgtcagaatttcctttttatggctgaataatattccattttatgcatataccacattttaaaatacatttattctttattttttaaaggaagaaataggatctcactgtgttgagctcactcccaggcccgagtgattctcctgccttagcctcccaagtacctgggactgcaggcacacgccaccactcctggctttgtttatttgttcatctgtcattagacacttgggctgttttcatgttttagaaattatgaataatgctgttatgaacatgtgcatacagatatctgtctgaatcactgctttttattcttttgaatatatacccaaaaggggattgttggatcatatgttaattctatttttttaattttttgaggaattgccattctgttttctgcagcagctataccatttaatatttccatcaacagggcacagaggttccagtttttccatgttctcatcagcacttgttattttctggtagtagtgtgaggtggtgtctcattgtggttttgattttcatttccctactggttattgatattgagcatcttttcatgtgcttattggccctttcttttattaatatatcttctttggagaagaatgtgtatgttcaagtcctttgcccatttttgaattgggttgttgttggattataggggttctctatatattgtagatattactctcttatcagatatatgattggcaattactttttccagttctgtggattgcatttttactctgttgatgttgtctttttatgcacaaaattttaaaattttgatgaagtttaatttgtctcttttttcttttgctgcctgtgccattgatatcatacccaaaaaaatcattgccaagtctagtgttgtgaagattttgccctatattctcttttaggaattctgtgtattaggtcttacatttaggtcttcaatccattttgaataaatttttttatatggtgttagataagggtccaacttcattctttggatgtggttatccagttttcccagcaccatttgttgaaaacactctcctttcaccattgaatgttcttggctcccttgttaaaaattatttgaccctatacacaagggtttatttctgggccctttattctagttcgttggtctgtatgtctgtctttatgctagtaccacattattttgatcactgtagctttgtagtaagtcacaaaatcaggaagtgtgagttcttcagttatgttcttttcaggattgttttggctattcgagatcccttgagattccatatgaattttagaatgggtttttctgtttcttcaaaaaacatatttgggattttggtaaggattgcattgaatctatagattgctctgagtagtattgacatcttaacaatattaagtattgtaatttgtgaatgtgggatatgtttccatttattaaatctttttaatttttcagcaatattttgtagtttcacttgtacaaatctttcacctccttggttaaatcaattcttaagtgccttattctttttgatgctattgtaattggaattgttttttgtaatttccttttcagattggtcattgttagtgtatagaaatgcagcttgtttggtgtgttgcctttgtgtcctgatactttgctgactttattagttctaacaggcttttgtgtatgtgtgtgtggaatctttagggttttcttacctataagatcatacaaatgaataaagataattttacttcttattttctatttcgactgtcttttctttttcttacctaattgctccggctaggactttctatgttgaatagaagaagtaggcatccttgctttgttcctgatcttagaggaaaagtcctttaccattcattatgatgtttgctgtgggttttgttcatacatggctttttaaaaaatttgtttaaaaaaattttttttcttcaatttttaagtcccggggtacttagggatgtgcaggtttgttacataggtaaatgtgtgccatggtgttttgctgcacagatcaacccatcacccaggtattaagcccagcacctattagctattcttcctgatgctgtccctccctccgcctgccacaggcctcagtgtgtgttgttccccccacatgtccatgtgttctcatcattcagctcctgcttagagaacacacagtgtttggttttctgtgcctgttagtttgctgaggataatgcttccagctccatccgtgtttgtgcaaaggacgtgatcgttttcctttttatggctgcacatacatggctttttaaaattattattatactttaagttctagggtacatgtgcacaatgtgcaggtttgttacatatgtatacatgtgccgtgctggtgtgctgcacccgttaactcatcatttacattagatatatctcctaatgctatcccctcccccctccccacaccccacagcaggccccggtgtgtgatgttcctcaccctgtgtccaagtgttctcattgttcaattcccacctatgagtgagaacatgcagtgtttggttttctgtccttgcaatagtttgctcagaatgatggtttccagcttcatccatgtccctacaaaggacatgaactcatccttttttatggctgcatggcattccatggtgtatatgtaccacatttgcttaatccagtctatcattgatgggcatttgcgttggttccaagtctttgctattgtgaatagcgccgcaataaacatatgtgtgcatgtgtctttatagcagcatgatttataatcctttgggtatatacccagtaatgggagggctgggtcaaatggtatttctagttctagatccttgaggaattggcacactgtcttccacagtggttgaactagtttacagtcccaccaacagtgtaaaagtgttcctatttctccacatcctctccagcgcctgttgtttcctgactttttaatgatcgccattgtaactggtgtgagatggtatctcattgtggttttgatttgcatttctctgacggccagtgatgatgagcattttttcatgtgtctgttggctgcataaatgtcttcttttgagaagtgtctgttcatatcctttgcccacttgttgatagggttgtttgattttttcttgtaaatttgtttaagttctttgtagattctggatattagccctttgtcagatgggtagattgtaaaaattttctcccattttgtaggttgcctgttcactctgatggtagtttcttttgctgtgcagaagctctttagtttaattagatcccatttgtcaattttggcttttgttgccattgcttttggtattttagtcatgaagtccttgcccatgcctatgtcccgaatgatattgcctaggttttcttcctggggtttttatggttttaggtctaacatttaagtctttaatccatcttgaatttttgcgtaaggtgtaaggaagtgatccagtttcagctttctacatatggctagccagttttcccagcactatttattaaatagggaatcctttccccatttcttgtttttgtcaggtttgtcaaagatcagatggttgtagatgtatggtattatttctgagggctctgttctgttccattggtctatatctctgttttggtaccagtaccatgctgttttggttactgtagccttgcagtatagtttgaagtcaggtagcgtgatgcctccaactttgttcttttggcttaggattgtcttggcaatgcaggctcttttatggttccatatgaactttaaagtagtcttttccaattctgtgaagaaagtcattggtagcttgatggagatggcatttaatctataagttgccttgggcagtgtggccattttcacgatattgattcttcctatctgtgagcatggaatgttcttccatttgtttgtgtcctcttttattttgttgagcagtggtttgtagttctccttgaagaggtccttcacatcccttgtaagttggattcctaggtattctattctcttggaagcaattgtgaatgggagttcactcatgatttggctgtctgtctgttattggtgtataggaatgcttgtgatttttgcacattgattttgtatcctgagactttgctgaagttgcttatcagcttaaggagattttgggctgagacaatggggttttctaaatatacaatcatgtcatctgcaaacagggacaatttgacttcctcttttcctaattgaataccctctatttctttctcttgcctgattgccctggccagaacttccaacactatgttgaataggagtggtgagagagggcatccctgtcttgtgccagttttcaaagggaatgcttccagtttttgcccattcagtatgatattggctgtgggtttgtcataaatagcccttattattttgagatatgtcccatcaatacctagtttatcgagagtttttagcatgaagggctgttgaattttgtcaaaggccttttctgcatctattgagataatcatgtggtttttgtctttggttctgtttatatgctggattacgtttattggtttttgtatgttgaaccagtcttgcatcccagagatgaagccaacttgatcatggtagataagctttttgatgtgctgctggattcagtttgccagtattttattcaggatttttgcatcgatgttcatcagggatattggtctaaaattctcttttttttgttgtgtctctgccaggctttggtatcaggatgatgctggcctcataaaatgagttatggaggattccctctttttctattgatcggaatagtttcagaaggaatggtaccagctcctctttgtacgtctggtagaattcagctgtgaatccatcaggtacgggactttttttggttggtaggctattattgcctcaacttcagagcctgttattggtctattcagggattcagcttcttcctggtttaacctttggagggtgtatgtgtccaggaattcatccatttcttctagattttctagtttatttgtgtagaggtgtttatagtattctctgacggtagtttgtatttctgtgggatcggtggttatattcccttcatcattttctattgtgtctatttgattcttctctcttctttgttagtcttgctagcggtctgtcgattttgttgatcttttcaaacaaccagctcctggattcattgattttttgaagagttttttgtgtcgctatctccttcagttctgctctgatcttagttatttcttgccttctgctagcttttgaatgtgtttgctcttgcttctctaattcttctatttgtgatgttagggtgtcagttttagatcttttcctgctttctcttgtgggcatttactgctataaatttccctctacacactgctttaaatgtgtcccagagattctggtatgttgtgtctttgttctcgttggtttcaaagaacctctttatttctgccttcatttcgttatgtatccagtagtcattcgggagcaggttgtttagtttccatgtagttgggtggttttgagtgagtttcttaatcctgagttctagtttgactgcactgtggtctgagagacagtttgttataatttctgttcttttacatttgctgaggagtgctttacttccaactgtggtcaattttggaataagtgtgatgtggtggtgagaagaatgtatattttgttgatttggggtggagagttctgtagatgtctattaggtctgcttggtgcagagctgagttcaattcctggatatccttgttaactttctgtcttgttgatctgtctaatgttgacagtgggatgttaaagtctcccattattattgtgtgggagtctaagtctctttgtaggtctctaaggacttgccttatgaatctgggtgctcctgtattgggtgcatatatatttaggatagttagctcttcttgttgaattgatccctttaccattatgtaatggctttcttggtctcttttgatctttgttggtttaaagtctgttttatcagagactaggattgcaacccctactattttttgttttccatttgcttggtagatcttcctccatccctttattttgagcctgtgtgtgtctctgcatgtgagttgggtctcctgaatacagcacactgatgggtcttgactctatccaatttgccagtctgtgtcttttaattggagcatttagcccatttacatttaaggttaatattgttatgtgtgaatttgatcctgtcattatgatgttagctggttattttgctcgttagttgatgcagtttcttcctagccttgatggtctttacaatttggcatgtttttgcagtggctggtactggttgttcctttccatgtttagtgcttttttcaggagctcttgtaaggcaggcctggtggtgacaaaatctctcagcatttgcttgtctgtaaaggattttatttctccttcacttatgaagcttagtttggctggatatgaaattctgggttgaaaattcttttctttaagaatgttgaatattggcccccaccctcttctggcttgtagagtttctgctgagatatcagctgttagtctgatgggcttccctttgtgggtaacccgacctttctctctggctgcccttaacattttttccttcatttcaactttggtgaatctgacaattacgtgtcttggagttgctcttctcgaggagtatctttgtggcgttctctgtatttcctgaatttgaatgttggcctgccttggtaggttggagaagttttcctggataatatcctgcagagtgttttccaacttggttccattctccccatcaatttcaggtacaccaatcagacgtagatttgatctttttacatagtcccacatttcttggaggctttgttcgtttctttttactcatttttctctaaacttctcttctcacttcatttcattcatttgatcttcagtcactgataccccttcttccacttgatcaaattggctactgaagcttgtgcatgtgtcacatagttctcatgtcatggttttcagctccatcaggtcatttaaggtattctctatgctgtttattctagttagccattcgtctaatattttttcaaggtttttagcttctttgcagtgggttcagacatcctcctttagctcggagaagttcgttattaccgattgtctgaagccttcttctctcaactcgtcaaagtcattctccgtccagctttgttccattgctggcgaggagctgcgttcctttggaggagaagaggcactccgatttttagaatgttcagcttttctgctctggtttctccccatctttgtggttttatctacctttggtctttgatgctggtgacctacagatggggttttggtgtggatgtcctttctgtttgttagttttccttctaacagtcaggaccctcaactgcaggcctgttggagtttgctggaggtccactccagaccctgtttgcctgggtatcaccagcggagaaccacaaatactgcagaacggcaaatgttgctgcctgatcatcccctggaagcttcgtctcagaggtgcacccagccgtatgaggtgtcagttggcccctactggaagatgtcttccagttaggctacttgggggtcagggatccgcttgaggaggcagactgtctgttctcagatctcgaactccgtgctgggaggaccactactctcttcaaagctgtcagacagggacgtttaagtctgcagaagtttctgctgccttttgttcagctatgccctgcccccagaggtggagtctatagaggcaggcaggcctccttgagctgtggtgggctccacccaggaattccctgaccccttgtgcttcccgggtgaggcgatgcccctccctgctctggctcatgctccatgggctgcacttactgtccgacaagccccagtgagatgaagccggtacctcagttggaaatgcagaaatcacccgtcttccatgtcgcgcacgctgggagctgtagactggagctgttcctattcggccatcttggaacctcctgtgctcgtacatggctttttaaatgttgaggtagttcccttctatttctattttgttgagtgtttttatcatgaaaggatattgaattttgttaaatgccttttctgcattatttgaggtataatgaatgaggcttttgtcctttattctgtacaataatgtattacactgatcaattttcatatgtcaatacatccttgcatttcaggaatacatcccacttagtcatggtgtataatccttttattatgctgctgaattcagttttctagtattttgttgaggatttttgcatcagtgtttataagggatattggcctgtaattttcttttagtgtcttttgttgttgtcgttgttttgtttttgagatagagtctcactttgttacctaggctggaatgcagtggcatgattgttttgttttaagggatagggtcttgctctgttgcccaagttggaatgtagtggcacagtcttgtctcactgcagcctcgacttcctgggctcaaatgatcctcttcccttagcctcctgagtagctacgattataggtgcataccaccatgaccagctttttcttcttcttctcttttttatagagttagggtctcgttattttgcctaggcttgtcttgactcctggcctcaaacagtcctcccaccttagcctctcaaaagcgctgggattacaggtgtgagctaccacatctggccctaactttggtatcaaggtaatactggcgtcatagaatgagttaggaagtgtttctttctcttcaattttttgtaaaagtttgagaaggattgtattagttctttaaatgcttggtagaattcacctgtgaagctattgggtccaggggttttctttgttgggggatttttgattactgattcagtctccttactagtaatagatctattcaggttttctgtttctttatgatttggtcttcgtactttttgcgcttctaggaatttgtccattttatccagattatccaatttgttggtgtataagtgttaatagtactctcttagaatcctttttattgctgtagaattggtagcaatgtccctactttcatttctaattttggtaatttgagtcatttttatttttttctccatcttgctaaaggtttgtcaattttgttgatcatttcaaagaaccagcttttggtttccttgatttttctgtattatctattctctattgtattaatctttgctctaatcgttatttccatctgctagctttgggtttagttttctctttttctagttccctaaattataaagttatgttgttgatttgagatcttattttctagtgtatttatagctattaatgttccccttagcctgtttttgctgctacatcccataagttttagtatgttgcgtttttgttttcattcatctccaagtattttctaatttatcttgtgtattcttctttgatctgttagttaagattgtgttgtttaatttccacaattttgtgaattttccagttttacttttgttattgatttctcactttatccttaagatactttgtgttacatctatcttttaaaatctattgagttttgatttgtggcctaatatgtagtctgtccttgagaatgtcccatgtgcacttgaggaaaatatatatgttgttattgggtagcacattctgtatatgtctattagatcttgttggtttattgtgttgcttaagtctagccattattgagaggggggtgttgaagtcttcaactataattttagaactgtctcttccttcaattctgtcagtttttactttatatattttaatggtctgtcattgggtagataattgcttataattgttacatcttgttactctgttgaatgtttaacatatagtgtcctcctttgtctcttatagccttttttggtttaaagtctattttgtctgctgttagtataacttcccctgctcttttttgattactattagagtatctttttccatcctttcactttctatttttgtctttggatctaaagtgaatgtcttatagaccacatatagatgggttcattctgccaatctctgtcttttgattggagagtttaatccatttatatttaaagtaattactgagcttgcacaacaaagcaaggctgtgtctctacaaaacatttaaaaattaaccagatgaggtggcatatacctgtagtctcagctactcgggagactgaagtgggacgatctcttgagcccaggagttcaaggctacagtgagctatgatcatgccattgcactccagcctgggtgatagagcaggaccctgtccctaaaaataaataaataattactgataaaggtggacttaacttctgtcattttgctatttgtttttctgtatgtcacatagcttttctgtcttccatttctttaattactgtcttcttttgtgttcagttgattttttgtaatgcaatatttaaattcctttctcatttccctttgtgtatattctgtagctactttctttatggttagcatggggattatagttaacatcctaatgttatataaatatttaatttgaattatgccagcttaacttcaataacatacaaaaattctactcctatactgctttattcccacccttttcagttattgatgtcacaaaattaaagctttatgtagttggtcctccatattggtgggttccacgtccatggattcagccaactgaagattgaaaatatttaggaaaataaaaataaaacatgtaaaataatacagcattaagaactgtttacatagcattacattgtattaggtattataagtaagtagagacaatttaaagcgtagaggagaatgggaatatgttatataaggtacttgagcatccatagattttcatatatatgggtgttcctggaaccaattccctgcagataacaagggacaactgtacattgtgtgcccaaaagcgtacactaatactttcaaatgtctcttatttaggaaataaaatgcaaaatgtagttacccacaaaagttacaataatacttccttttagaccaatgattttttttttccaccaaactgtattcatctcttaaatcatgtaggaaacaaacaaaaggagttataagccatttatacaatagcaatagcttttataattatccatggtttcacttttattgagatctttatttcttcagacagctttgagttactgtctagtgtccttttattttaccctgcaggactcccttgaacatttcttgcagggcatatctagtggtaatgaactcccttagtttttttggtttgttttattttgtttttgtttttgtttttgtttttcattctggagatgtcttaattcctccctcacttttgaatgaagttttgccaaatataggatctttgattgacgattagctgacctccaaagtttctgatgagagatctattgataatcttattgaggatttcttgtgtgtgaccagttgcttctttcttgctgctttcttttttatttttcttcttttttatttatttattttttttgagatggcatcttgctctgttgtccaggctggagtgcaatggtgcagtctcggctcactgcaacttctgcctcccaggttcaagcaattctcctgcctcagcctcctgagtagctgggattacaggcacccgccaccacacccagctaatttttttttttgtatttttagtagagacggggtttcaccatgttggccaggctggtttcgaattcctggcctcaggtgatctgtctgtctcagcctcccaaagtgctgggattacaggcgtgagccaccacgcccagttcttgctgctttcaagattctctttttgtctttgagcagtttcattataatgtgtcttgatatgggtctctttgagttcatcttacttattgtttgttgagcttctttatgtcctacatcaagtttgggatattttcttcatacattttttctttccctttctcttcagcatctgggactcccgtgatgcatatattagcttgtttcatggtgtccttcaggcactgtaagctctgttcactatttttttaaaggttttttctctttcccagactcgataatttcaattgtcccctctctaagtgtgctcattctttcttttgcctgcccaaatttgcctttgaatctctttagtgaatttttcattccagttattgtacttttcagctccagaaattatttttggtttctttttagtttttttcatctctttacttagattttcatgttgttcgtacatcattttcttgactttctccacatctttctttagttcttttagcatcttgaagttgttgtaaagtctttgtctagtagatctgccattaggtatctttcagggatggttgctgttgatttagtttttttcatttgaattggctgtactttcctgtttgtgtgctttgtgaatttgtgttgaaaactggacatttgaatgtaataatgtggtaactctggaaatcattctccgtcttccccaggatttgctgttattgttttgttttgttttgtttttaattgtggtaggccatctctgtgccaaggatcagtctaatgtgtaaactcaaggtcttctcaggcattttctaagcctttccctaggcttgcataatcactttctagttttccctgtatatgccattgcttttcaatgccttagtccctaatgtctgactctcaaaggggataaaagagaaaaatgaaaggagaggaagggcactagccctttaaatctcctagaagtctcttcaactggagggggaatggcttgcaacaatgggagaaagtgcaacaatgcaccccttctttgtctgcacctctgtatcagtgatcagagcacagatccctgatatttggaggacatggttgtttttgccttccctgggtcctgcaagttgtgttcaggttgctttaggaacacatgcacagctgcccaccatgggcctgggtacctgctatgtgctaagagctaaaattaactgcggtttaccatccaagccttcccctggaagttgcacgtcttcaattgttcctaaaatagttgcatcagacatattctgccagtgcaatattgtctaggtggggaaacagattcctggtgcttcttactctactgtcttctctaaatccatcttttaagactctcctgtggacctcttggaccatcttccctcataaaaattctggctttggcatccagttacaccagtatgagactggcccatagttacacaactcaagagaataggtaataaccatgcactgtctgttctgactctttcaccctactgaagaatcttcctcctcagtctttggtctagaatattagggaccctcattctttttatgccttctgagagataaaattattgcagagcaatgcagaaactgagccagtggcccataattactagacatcagcttctcatggttaaaaatatatgtggatttttctcccatcactaagcaaacttcgtaatgtgtttactagaataggtcactgtttgaggggagagattggaggagggcagtcagttgggaaacattttgtaggaagtcttatggatctagttcttctgttgctgtgacgaatcataccatcacacagaggcccagattgggatctcatcaacacctacagagtcactgggcaaattacaaaatgtgtctcttcccctgggtagcagcccagtgccagaattcatcacctggagctggttttcagtcccaccttctcccttccttgggcccctttgtgttgtatacaggctattcaaatcttctggtggtcctgagtttacagcacagtgtatggagctaaacaaacctgggtggaatcccagcactaccacttgctgtgtggtcttaatgcagggtacttagaacttcagttttctagctataaactctcaccacattactatcagattcagtgaaataacatgtgcagcccttagcacagtaaccagaacacactaagtcttccattggtgctgtgattgttattactcactggggtttggttatgatattacatttatctttgatttagcattacattctcaaatggataagtacttacagtaagtgctattatgctcctctgtaaaatagaaagtgtcaaccatttttcaatgacattccatggttctgactgctggattgcattattcatgtgccatttgggtgtaagatttcattgtccatcaggaaaaaaatggaaataggcacagagggaatcagcgtttatttagtatctattattggggggctctctatattgtcatctcatttggcctttaacaaatgagaagttgaggctgaggaagattaattcacttaaagtcacatgtagctagtaaaaggcaaagccagaatcacattcattttatttgttcattttatttctcctttcctgctccccacttttcctgggggctataaggagatccttaggattcctcataatcatttcatttatctactatttactttatttgcctctagaatagaaattttgctttcatttttggcactgtttagagagagaaaaagttaagcttctctttctccgttgtcttttcatttttaagccaatctctttcttacaggtagcagtagctgatgtgcagtttggccccatgagatttcatcaagatcaacttcaggtaataatgaacgatgctgtatttttcacatgctgattttctttaaaaagggtggaggtggagctaaatttacacatttaaaatagtctttcatttagataatagtgtttggaccaatgttaaattccctgaactctgtaacagtattatagttatataagagaatatcctgttcttagaaatacacattgtggtgtttagagatgaagaagtgtttgtagcctactttcattggttcagcaataggtcaggcacggtggctcatgcctataatcccagcactttgggaggctgaggcagtaggatctcttgagcttgaggagtccttgaggagtttgaaaccagcctgggcaacatagggagacccagtttctgcaacaacagcaacaataaattagatggacatgggggtgtgtgtgcctgtggtcccagctacttggaaggctgagatgggagaatcacctgagcccgggaggtcaaggctgcagtgagtcatgatcacaccattgcactgcagcctgggcaacagagtgagaccctgtctcaaacaaacaaaagaaaaaaaattggttcagcaataaataaaaaatgtgtataattgtatgtatgtacatgtatgtgtttagagagagagagaaagcaaagcaaaggtggcaaaatgttaattgatgaatgtagagaaagggcatgtttagtgttcattttcattcacgtttctgtagatttgaaattttccaatataaaaagtaaaaagattgtcttttcaatgttgctgaatcagctctgtcagagagaagatatctgtaatttatctaattcaaaatatgagacagaaaacaaccaattgatgaacaatgagatcacatggacacaggaaggggaatatcacactctggggactgtggtggggaggggggaggggggagggatagcattgggagatatacctaatgctagatgacgagttagtgggtgcagcgcaccagcatggcacatgtatacatatgtaactaacctgcacaatgtgcacatgtaccctaaaacttaaagtataattaaaaaaaaaaaaaagaaaacaaccaattgaaattcagcgaagttatccatgctccccgcacatgaacatgtttcattcactattacatttaaaaatatatgagaagtgctgacagaaatgtgtgctcttagttctttgcatgtatggtctttgtgtagttgagtaaactcggaagaaataagccttaggagggtttctgatagctttgcagtctgtttcacaggctgcccatctcctccttaccactgttgccccattttcagtctgcttctgaagggatggagcacgggtgctcctgaaccagattgggagtgggaatagcagggagagagagggaaggaggctggctggataaggaagacgctatggatacaggcctcgcttgctccaggccaggactgacgtgattggggcagccagccactgtcctgggcagaggcacagatgctacctcttgcacctggtgactgtgtcacttaactgataggctttgaagtgtcacattttggtctactttaaatctttcttcttttaatcaaagcaattttttttttaacttggaggaattacataaaatcttgagtcaaacatttcaatacattatttataggattaagtattctaataatttcaccaagatattagcattcaccatctgagaacttacccagttaactttctttcagctaaaataaatattaatgtgttttaattcttttagtttcaagataaaatgcttaactaaatctttgttgagttctgccagtgggtttcttagcaaaaaagtaggcatatggccaggtgcagtggctcacacctgcaatcccagcactttgggaggccacagcaggtggatcacttgagtccaggagttctagactagcctgggcaacatggagggaccccatctctactgaaaatacaaaaattagccgggcatgtggtggcgcacacctgtaatctcccagccactgggggctctgaggtacaagaacactggaaccctggaggtggaggttgcagtgagctgacatcacaccactgtacaccagcccatgcaacagaggaagaccctgttgcccacccaccatccccccaaaacacacacacacacacacacacacacacacacacacacacacacacacacacacacacagaaatgacgattctgaccaggcgcggtggctcacgcctgtaatcccaacactttgggaggctgaggtgggaggattacttgaagccaggagttcgaaatcagcctggccaacatggcaaaaccccgtctctactaaaaatacaaaaattagctgggcatggtggcatgtgcctgtggcccaactactcggcagggctgaggtgggagaatcacttgaacctgggaggcagaggttgcagtgagccaagatcatgccattacactccagcctgagcaacagagcaagactctgtctcaagaaaaaaaaagtgtaagaaatgacaattctaacatctttttttaaaaaaagtgtttgtgctcttttgattcaggtacttttagtgtttaccaaagaagataaccaatgtaatggattctgcagggcatgtgaaaaagcagggtttaagtgtacagttaccaaggaggctcaggctgtccttgcctgtttcctggacaaacatcatgacattatcatcatagaccacagaaatcctcgacagctggatgcagaggcactgtgcaggtaagcccaagactcgggcctaaatagtcccattggcctttctgacaatacatgcagcctagaaatagattaaattagactcactctcttttaagttgctttccatgcatgtgaaataaacaaaatattagaacctcactatttataggactgatgcatatctcttttgttttgtcttgcttcactttacttgaaacagtaagaaaatgtgaataataagaattattaagggtcaaagtgaaacccaaaatgtaattaaccacaagtatcacttgtatattagtgcagtaagaattataatttttcagattgttttcaaagttttaaaaattttgaaaattgtcttttaatgttcgatgaatgggctttatttattatacttgcaccttgtcaatattatgagagaattctctgtagtgacctaaacctaaaaaatgccttttaaagaaagttatttgttgctgatggaagcaaggcaaatataaaattttatgacatattaattttaaggacatttaaaatcttgacttttaagagagagaaaagatataagctaagtagattaaaaacccatgggttaaaaaccgaggtgacaagcaaatgacaacatattaaaagattatttatggggtatgtggtgacgtcaacatgggtttgtttccttggtgttgagaactctacactcctggtagtcagactaggtagcgtttacccttccatgacttgcctccagtagtttctcctgtggccttgatctagtgcctgaaatgtgcctgtgttcctcatctgtttcaatctgcatgacttcacaataagccatcatcattgtagcccagatttctttttttttttcttgtgacggagtctcactctgtaacccagtctggagtgcaaggctcgatctcagctcactgcaacctccacctccagggttcaagggattctcctgcctcagcctcccaagtagctgggattacaggcgcacaccaccatgcctggctaattttgtatttttaatagagacggtgtttgaccatattggccaggctggtcttgaactcctgaccccaagtgatccatctgcctcagcctcccaaagtgctgggattacaggtgtgagccaccgcactgtgcccgccctaccccagatttcttgacatgtcatttggccagtcacccagcacattcatgggggattgcagcccaaaagaaatggagagagctccggccaggaaaaagggaggtccaggtccttgtttggctcttcctggatagctgcttgtctctgggtaactctgccttctctggggatgttttagctcagctgtaaatttggaacacttggtttccagtatcccttttatccctaacattgaatagataccactcagaggaagggaagatgatatctaaattacatggtgcttggtagtcatggtggaatgttgcaaggcagtagaggtgtctaaggtgggccaaatggctgccgagatagaagagggaggacagggtgaggggctggagaaaatttggcctctttcctagtcttgtccaggcccaagcctagccacaggtatgtgctaggcaatgaaagttcatacttttaaaggtgactactagagcatcttgtattgtaaaagaaaatttaaattgtgttggttacgctccactgttaaaaattgtggtaaaagaaacataacattaactttatgttccactttttaagggaagaaaatgtactattgctgtacattttaggaatattctaaacaaatagggttaattcattcagcagatttttattgagctatgtacaagagaatgttttagactgaaagttataaaatgaagttcttgtcttctatgagcttatagactagaggagctgaaatatttcaatgaaaaaaagtaatgttacgtgctcagttaaaaactcacacaaataccaaattccataagcactatagttaatcagagttctttcgtcatgtaaataacaattttatatagttttaaagtaaagaatgggaactggattgctttaatatatggttttagagaagcagagaatgtcagatgtgcctctcctctatgaagtgcctagcactctccatccagcctctcctcaggacctggggctcactaagtgaaaccctgagatttagaagctttgctttatattgaacccaactttgtccacagttggcgcacaggattgctagaacagagctattattcctcttccccagaatggacttccaacactggaggacaggaattgtgtccccccaccccagacatctttccttttctgaactgagcacacccttactgctatgagtggctcctaacagatcctggtttcatattcccaccacatcaagggtgcttcccctgagtacccttttctgattgatagaccttgtaagcatggctccagaaccgaaaagctcacactaggtttaggggaaccagtgacaagtaagcagaacagtcccctccactgtgctagccagagagagcaggcctttacaaatgtaatccccgatcacatttatttcctgatggccacatcacagccttggtcaagaatctcaagtgtttctcacaagctgttttctaccacgtcatctccatcttgttgggtgaggatttggggtagggatgggtccttgtgctaatcgtagtgagttttctagaggcaagagcagaccctgatttattttcctaatcagttttgtcttcattctggcccttacctggcttatctcccttaagatcatccctttaaggatgcccgcccactttggactgttcaagaaatctttccaggctccccacccccgaaccagcttgccctgtctctgagctgacttacatggctcttgagaccttagccctgcagaattctgtccttcccttcatcttcccttttgggatacctaatcaacactgcctatggagagcttttcatcggttgttgacctgtctaaatgactagcattcacctgtatctctctgttgggggcatttggaactccttacactccttatgagatgccttgctaacagcaaatattctatgtctattatatttccaaatctaccagtttaggaaccctacgttgtaagtctcctcaggtctgggcactgcatttggtactagagctacatagatgagtaagatgtgcttcttgtctctgaggagctaatactttagttagcagggaaagtgagtgatttcggtataggcttgtaagtgcccgcagaagaggtttacgcagagtgttgtgggtgcctgtgtcaaagagggcttcgcaagaggatacttgagttgcatcttaaaggatgagcaggagttttgaaaggaaaaaaggtggagaaaatgttccaggtagagggagcggcatgtgtagaaacaggcaggacatccgggcacctctgctcagtgctagatggctgctggtcaggcagatgtggagtaggtgtcaggggaggttggaacagcagacgtgaaccaaatgatgaaggccttgtgtgctaagccaaaggctgtggactctaccccgtaggtagttgaaacactgatagattctgcgcaggaaagtgttgagcaggatagaaaaataacttggctgccaagtggagaatggagtagaaaactggaggagatgaggcaaatcaatcagttgtgaggctgctagaggccatccagtagttcctaacagagtatagcttcatattcccactgtagcacttgatatcaatgtctcctcccaacttcctatcaaaaaacccatgaagagggaaaaagagacaaaaattgaccatagcaataataaataaaaacccacaaagataagatgataggtcagaagctgagagaacagaaaaggataggaatctctactgtatctgtcgtaccgtggagactaataaagaagcctgtttctgaactgtgcctcaagcacttcagtctttgaagctgaaataccagtggccataaaggaaggcagtggaaacaggctttgctttactcccactgtgttctgccaagcctgggatgctggagttgctctaaccagagaaacagatgactgagccccagcagagcagcaaggctttatgagctgggcagaggcctgcactcttgcccctgccatccctgctgcccctgattctttactttctgcatctactcagaaacccaaggtaaggaagagagggatatggacagagacatggtttttcctactatgttttaagaagggacagaggtataaggaacctgaagacagttctccacatactgcagtttcaaaacaacaaattgcatcagttctcaggttcagtttgagaatcagagagaacaggccaggagccccgctctgcagcagacctgtgcatgcctgctggcagtgttctccaagcccgaactgtgcttgttgatgtgatctaccgcccagacctaagaggaggacagctgctgacaccaagggttcagtgaagaggtgctaaggaaactcttgtgaccctctttgttggcaaactcttagcctgcatagatgcgaattgcattcaggggtgtgtaaacaggatgagaaggggggcctgtgaaaagtgccaccacataatgaggggggaaagaacagccctgaagactaagaaaattattttttataagacactgtagaaccttttgaagacatatgcttagtggactcagaagaggtgcagcagtatttcttggtgcaacaggagtaggtctctgtaataaaagggaagatctcataaagggatatagaggaaataaaaaaagtactacttgaaaacccaaaacgcattaacagaattaaaatctatgttgaatgcagaagcaagattgaactcagagcaccagatgcttttatacaatttcttgattcaccttggtgtgcagatcctttataccattataaatcccattctttttcatctgaaactcattccacatggcagagaaaaatagcaaagcacaagtaatggagttgtgcttttgtgaaacttaactcattaaagggctgggctatgttcttatagtgagcctccattatgtggccttttttccagtgttgtgttgagaccattatcagaattatttgtagttgcctagagtagcttgagtctggtagttgcccccagtatccatttctattcttttcctaataacagaatctctgatgtgtagctgggcatatggctacctagaaaatagattgcattccctagtttttcttacagctggccaatggacctatcatgtgtatcttctggaaagtatacttagggaaggagcattccctttttcctgctatctggaatgtggacattatggctagtgttcagtatctgtcttggaccatgaggaagaaacctcatgtacagacaatagtagagaaacactggtaggagctaggttcctgatcctgcagagtccatggcagccctggactgtctcctctgcacatttttgatgtgtgagacagatactgtttaaaccactcttctctggtgttttctatcttgtgtggccaaaaggattcctaatggtaaaccaagtagcatgcttttaagactttcccagtgaggccgggcttggtggctcacacctctaatcccagcactttgggaggccaaggcaggcagattgcttgagcccaggagttcgagaccagcttgagccacatggtgaaaccctatctttacaaaacatcaaaaaataaaccaagcatggttggcacttgcctgtagtcccagctacttgagaggccgatgtgagaggatcacttgagcccaggaggtcaaagctgcagtgtgccatgatcacaccactacacttgagcctggccgacagagcaagaccttgtctcaaaaaaaaagtggggtgggtggggacttccctgagtacttaacactgctttcagaatctcattctacaggatcgcactccatctttttcgtgaccttcttgaattctgacttcctgaacattcaggtatacatttcaataatgccaagtaatttctttcctagttttcatgaattccaatgcaaggatgttatttttcaactcagtttcctgacatttctgttttctagcccgttcttccttcatatgcaccagaaaaggtcccagtatgtctctacctttttatacagttttagagctgtttttaagggcttatctccaggtaaacaaggtcctcccttccactttatccttaatccagtgcttctcattcttgtgtctccagataggagtagttcattcaaagctccttagtgagatcacctacctacttgcctacttgccattacatcactcccatcttgatttttcttctaaaaagctgaaagctggtttgaaatggctacatacttaaatttgccctttctccttccaaatctctgtgatatgatggaaatgtaaacacaggacagatacagtgtcactagaagtgatgaaaataccatttgtgagtcacgccttattccctgtttgagatcagtgttaggatgagtattagtcagcaggtgtgatgagtgcactagctgtgtctgtgagtgtctgttgtgccagtgacccctccaggcctaagcagcctttcccatagctcttccccaggaagctgagcctgcctgctctccccagtcagggggaccagggttgaactggggattgacacctggccagtaagccctgaggtggcgtgtctgcaaggggtcttccagcagagccatgcagcacccttaggttggctccctctggagaggataggcaggtggatgctagaggagtacagagtgaacacagaaaagcagggatgttgagggggtggggaagaagtgaacatgagagagactggctggtcgctagagctgcttttccattcctgagcaacttccctacccctggcctattctgcatgtgttgttagattcagcctttctcaacctggattccataagaaaatgaagcccgaatccctacaggcaagaatgggcaaaggagaacacagtcttgcccattcatttgtgtattatgtgtgactgcctttgtgctacagtggtagagttgagtagttgtgacaagagtccatatggcctgcaaagcctaaaatatttattccctgaccctttacagaaaagtttgctaagactggggcgggggcatttggctgagtgtgctggctcacgcctgtaatcccagcactttgggaggccaaggcaggagactgcttgaatgcaggagtttgagaccagcctgggcaatgtagtgagacctcgtctctacaaaaaataaaaaaattagccagtggcatgtgccagctggtcgcagctactcatagctggagcccaggaggtcaagactgcagtgagctgtgattgcaccactgtactccagcctggtgacaaataggaacctgtctcaaaaagatgggggcatccatcgtgcatgatgaatctcttacgcatctggaatggttatgttgtataccatctttgagagacttgagaactagtcactcaaattattttctggattttgtgattcagaagtggctctataccttgaactaacagctgaagcaaatgcagtcagtcttgactggtttctgtgccatcctagacacattctccaggaggccagctcacctttgacttgactagggcagtctggttatgttcctctacattctcctccttttagagtccctctccaacataagtcgtcttcctctgggtctggggtgagttcctttcttctccagtggagttgttcttctctagagtctgctcgcttctcccagtgtaggatgagttcaaagctgttgcatatctccagtggagcacttcttttctttcttttactctatgtcacatttatttctgctctgatattttggctgtattttcattccccatggcctctaaagctgcttctgcaaaagggttgaatttactctgtatgggaagtcttgtactctttgggtaactttagtcgaacagtctcttgtacttttctagaccagtcctctgttcttaaccttttcatgaggtgttgatgctcttctttctgaccgattacaatatcttgcatttcctagttttggattatttttggttatttagcctccattttacctagtaactcttcatcctttgtgctccttagaatgcagtggagccagcccttgggctcctttatccccgttgtaagcatagccatcatcttgtggtaatagacataaacttgcattttcctttggaagaagagaccaacggcttctttcatgtaagcacaaagcagggaaaatactccgcctgaaacaatgcaggttaacaaagatcagaacaagtagaatacatgtcatcttagttagctgttaattcatactccataatcattacagttaacacagtccactgagtgggagtttgcccccaaaagagagaaagatcaagtagtcaagaaggtgagtgaattcagagagtgaggggatcatttactctcccttctacccctcttccaactttaattgttgtaattgtttaagtatatttggtttttaaggattatttttatatttattttaaagttttgtgttttttttaaggtctatcagatcatcaaaactctcagaaaacacagttattgttggtgtagtacgcaggtaaactttcatttttttaatgttgaaattgaggtaccagtgtaatacttgctcttaacagatggccaaataacagcttgcatgctgtgtcaggcatgcccctttgtagtgtggccttctcttctttattctttattttattttgctgcttcagttaacttcctggaaggactttgtgctctcatgctagatttttgtgatttttaaactgcctttcactttagaaacaggcgaactatgagagaattccattcctaaaagtatgaatgttttccaggggtatcttcctagggccttctaactccaaatatctctgaggggggaatcttaggttttgtctttaaattggaggtaaggaaagaagagaaatatattaggagaagggcaagtattcaaattaatgttatttagcttatatgtttttatacatagaagaaatgtttctatgtactttaaagttttttcctgagctgtaggggagaaaggaattaaaaaaaaaacctggaagtagaagaaaataggagtagtttaaattaaaaattttatatattaaaaagatatatgaacactcctgtattcctgctattaatgtagtttgtgtatttcaagtattataatatataattccaaaaagctaaatgtgaaattgaaacagaaaacagttttcaactttatcctttaaatttgtatattaatctgattcatctaaaagtactcattacataacgaagtattatttaaattagtagagtaaaagaggtgagatgtaattgataaaaactatgtctatgttctttactgtgttattttgaagggtggatagagaagagttgtccgtaatgcctttcatttctgctggatttacaagggtatgtactcacttatttgttatacaagtataattcaatttgagaaattattttatctcagttcagtacccagcaaaagctttgtattaatttgaagaaaaaaaattgtctggccaggcgtggtggctcatacctgtaatcccagcactttgggaggtcgaggtaggaggaccccttgggcccaggagttcaagaccagcctgggcaacataaggagaacctgcctcaatcgtacttaaaaaaaaaattactgtccttgttttacagtttggtttaactttataatctgctaatctaatctataatagttcatagtctctcaaaactatgcctgctaaggtcatctaaacataataaaatctcctttaatggcattttcactaaaaattataccacaggatgtattgttatgatgctgacatgtatacatgcaactttttaagctagttcaaggattctggaaataaggcagcccaaacacagctctctttctctccactcccagcttcaatctcttggtttccctaagccaaaaggttgcttggggctttggtcagctggctgcaaatgaggccttaggaatcatacagagagaacttaaataaggctgacccttgggcagatttgtagcccaggttagtataagaaaggtagtcaagaaatctcaagccatgaatttagtttcaagttttctggatgagtaggactcctaagtgcctggcagaagcaaatataaatcctccccagaggaagacagcttcatctttgcccgcagaggatctccataaataattgctcaagggcagccggcagcagtcagtcaaagctggagtcaatccaccaggtgacagggcatcccaaggaaaaactaggagggaaaaaagcctagtaacagaccctcacacccctcagagattagttatgagatatgaattataaagcaagtatgcttactataggtaaagaaataaaagataaaccaggaaatatctgcaaggaataggaaactattaaaagtggcatagcaaattttatgaggaacaaaactgaattgtaagaaatgaaaacacagtaattgaacaatttaaaacttagtaagtcacatgtagcacagaaatacaatgacaggaaataagttagacaggtgaagaaatgtggaggatagtgtgtgaagttttagttgtgtatatgtaactggagttccaggagaagaggaaggatagaacagaggaaatatttgaagagttactagctgaaaattttccagaactgatgaaaaactaattcatagattcatgaattctgacatatccaaagtagagtaaattttaaaagaggacacatcctagtgaaactgcaaaaaaaaaaaaaaagaaaaggacttaaaatcagccacaggtaaaagattaccttcaaaagactgacacacacactaacagctagcttctcagcagcaacaagtggaaaacaagacagtggaataacattttcaatgcaataaaagaaaataacttccttgggaggccgaggtgggcagatcacgaggtcaggagattgagaccatcctggccaacatggtgaaaccctgtcttgactaaaaatacaaaaattagctgggcatggtggtgcacacctgtaatcccagctacttgggaggctgaggcaggagaatcgcctgaaccagggatttggaggtaggttgcagtgagccgagattgtgccactgcactccagcctggcaacagagcgatactccatctcaaaaaaaaaaaaaaaaaaaaaagaaagaaaagaaaagaacttcctagaattttatacctagcatacatatctttcaacaatgaaggtgaaataaagactttcagaaatgtggacattgagagaatttgtaactagcagatcctcacaaggaaatgctaaaggatatacttcaaccagaaggaatgtgaattccaggtggaaggtctgaaatgcaagagatgagtaaagaaaatggtctgtatagggtaaatataaatacatatttactgtatgaaacaataataatgtctagtttgatgagaggatacagggagaaagagactacaaactaatcatatatctagccaagttattgtttaacctttcttttggggatatacataaaattcagagatatagttccccaaggaaaataattcagaaaaggactctaaccatataagaaatgaactacaacagaaatttgaagaggagaggagggaaaagtagtgagctataaaccctgccatgtgcatactccttcatggtgcctcctgctttctctggctctctgtctttctttatagatgtacccacacttatgcatatatgtataagattagtcccaaacagataaacatagactagaatatataatattcttttaaaagaagggacatactcaaagaggaattttaataatagctcacttttaaattctagactatcttagtcaacgctaggtgtttgtaaggtttgtggggaggatgcaggcattcttacagacttatctaagaggtagagtgagaatgagcccaagaagtattcatctttgtgggaaatgttctatgtgggaaatactttattctgggggtaattggtatcttgttttcaaataatagtaaagaaatctatgtctgcttttgagatgatgaaaaggagggtaaccgctgatagaacaggaaacttaagtaaaacttccaaaataacaagaggaaatagggagtttacagcaacttgatcaaattgagaagctgaagaaagatgaaacaacagtgtaaaatcagtgagaaacacaaagtcagatagaaagaatagaagcaggctgggcacggtggctcacgcctgtaatcccaacactttgggaggctgaggcaggtggatcacctgaggtcaagagttccagaccagcctggccagcatggcgaaaccccgtctctactaaaaatccaaaaattacccgggcatggtggcgcacacctgtaatcccagctactcaggaggctgaagaaggagaatcccttgaacccaggaggtggaggttgcagtgagctgagattgcaccactgcactccagcctgcacagtgggagcaagactccatctcaaaaaaaaaaagaaagaataaaagcaaatgtatatgaatgggctgaattcttcctttaaaagataggctgttagattgggttgaaaaagtacaattctataacagttacaagacacttaacatgataaaaggagcttaagtaaaagaacatagaggtagcaagtaaatgcagacaaaaagaacacagatattgatattgatattaatatcagatgaggtggaatttaagattttagtttatatgtaaatacagttttatataaaaagcacacattaggttattgattatatagctgtggctttcttgtgtttccccctttttggacaacccccacaacatacatacacatcagcacctacctccattccctgacctctagtaattcctgttaaattgtatgagaacagtttacttagccagcagtaaggcgtcccaggttggaagtcagaagtcccctatggatctttatgtcatccctccctaagctgcttgcttttgcaactaaggccgcaaaactggctattccttttaacaagaaccttagaagcttccactttctagtgaaacttaggggatagattattccctctgccttgggttatttgcttacctacagccgcatgaggtcattaaggcttgtgtttgtttgaggtctctttgaaagtacatagatgcactgttggaaatttgtgcctggtgactgccgtgtttgaaattctgcccaagaagtctatcagcatagttctgtggaccagaaagagcatcctggtagaaggtcaagtaaatcatggtccttatattttcttagtattactgtgttatcatggagctaacttgaaaagtaactgacacacacactcttgctgcctcaagcctgcacaccttaatcaaaatcaaggaaccccctgaagacttcaatggaaccacttttaggtgcacgcccctgtgaggacacgtccatgcaaaaagcccaaaaagctttacagtagtcactttagaagcacctgacttaggaaatgtagaggtagtggcaggctctccattttgtaggtgaggaattcatgcggtcaaccagtcctcagagaccactaactaattagtgctaactaatctcatccagagtctcttacttttgtgtgacaaaaggatgctcaggttactgagaagaagagttagacctggaggaaggggattctcccagtcatggctgtaggcggtggtgccaaggcttgaatctgaaagctaacaccataatgatatctctggtacaggggatggggcataggaaaggccatgagctattttgtgttttagccatgtttcaggattgaaaagtaggtggaggacctgctagcttcctcaattggatttggccattgagtcggtagactcactgctgggtgcacattagaatcacctgaataacatccctagggagtctgtttcagttggtctggggaggggcctgcatgctggtgttttttcaaattgcagataattctaatatgcagctgagagttgagaaccactgggagaggcctagcaaagatgggctcaggtcctagccgtgggtgtgatatgctttggagaaagtgaggttaagttagcttagaagtctaggatttgtagtcccagcccctttcgtggaagaaggttaagggagaggagactaaccgctgtttaagcagagggaataagcttgctttctgaggatccctggacctgattcttcaccctccatgccctgtgggatccttgggacagaaacaaaagttggcaaggggcaggaaagatgagatgtttagataaagagaacagtgtttaaacacgcatagcaaaacaaaagttttgagggagggggcaaacaggagcaagatgctgtacatttggtcacatgctagttttttttaccttgatttctgcctttggggtaaaaaagtttggtggatacataacattcagaccaattaaaaagtctgattgcatgcatgggaatccatttgtggaaatggataaatacacattccctccacagccctcacatcccctccacagccctcacatcccagaatcttacctgcggaggaactgaggacccctgtctatctcaaggccccgattccatgtctcctggagtggcacaagcactatgtcaagaaatctcttttccctgtccctgcccaatcagaagtgggttcctgtccagtgtttttgggtgttcccatggggtcttggctgatggaggtgtggacagcaggtctagcatactcctcccttctcagtcggtgggagctggcaggcatgtcacctctgtcagacctctgggtaagaaaggggctctgttttggcctataggtataaggtttatcatgctcctggtcaacaggtcttgccttcccctgtgggggtgacagtagctgttctttacatttatgcagcagtttgtacttaaaatgctttctcccatcatgtctttttattctcggtgaccttcattgggtaggaacagtattatttttcttgctttacagttgaggaaacaggctcaggaatgttaggtgcctcatatacaatcatacagcttttaaggcacgaaccaagggctagatttttaggttgcttgacacccagacaagaccctgatcacagttcagacgggtcatttgcgttcaccgtggtagtagaaggaactctttaaggggacccctgtcccagattggtctggctggggcttatagatagtgatatgcagaggctctgcctcttaggcatcagcttcctcttcagccaggtagagtattgtccacttattgtgcaggtaaaaagcaaggagctctttagaaatgggggagtaatgttcacaaatatttttacatttgaatagaactatatgacagaacacagtggctgctaagatgtctttatggagtatttaatttgatggtggaatgggtccatcttctcagaactatgtaattcactttgtcgtgagatatttccactatgtaaaggttatacaaaatacttaatgtccacggctataagagacactgggcaaatccatccatggcttctgccagtgcctctgctgtggaagataatcctctgtcggcttcactgagccactgttggaggttagttcaggaaaatgttgcccatgttggggttccccctgtgaaatacaggcgcaaatagaaatgcaagtatattttcgcttattgtaaacttacatgactttaaagcggaccaaatactgttgttgaatatactctgaaagcctaatataagtaggactttagttaatgaatttcctcctccacatgttctagccttgctttgtcagtgacatgaaaacaaccaaaatgctcttaacggaagatgctgaaagaaaagccttttttttttttaaaaaaatgaaaggctactaaatgatagaaggaaaagcattcttaaaccctattttttaaaaagctaatctggtgcccataaagtttctctcttaccttctgttcatcattaatgataaagtattttttagatttcagttgccaagttgagaagtttgtttaaagagttatttttattggcacaaataaagaagcacttttgtttatccacaaaattcctctttctgtttgtagaggtatgtagaaaaccccaacatcatggcctgctacaatgaactgctccagctggagtttggagaggtgcgatcacaactgaaactcaggtaattctaccacttctggaaagccctccaggccatacagggcagcatggcaagtgagaactttggttgtggggaatacttttgaaatggcctcttgcagaaatgggattggagagaatggagtggcaactcccctcgtacagactttctggagtctgcctggatgtctaataaggggtcattttagtgattagagactcacatttaaagatggagcccccaaataatagtaagtttaaaaagcagaatacaaactgcatatgctggattatctgttttgttttctaaggggacaaaaacggttttaatatacacccccccaatctattaacattagttatctctggtaggtgacatttttttcttctctacaataagcattttatctgctcttgataaacagggttttttggtttttttttttaagtgacatgagtagaggcctcattctttgtagagtaagaaaagcagaaaaattaatataattttatcagcttgacaaaagaaaaataaagtcagcagcttcctatcattttaggtttcttccttgggtgttcaactattctttaacatttcctttactagggatcaaagagagaattggatcatttcatttgtatgtgcccaagacagtcaaaggggatcggaatgagagtaccaagattaataaggaccagtacagggttccacgtgtagggaagataggtactttatagacaaaatgaaatgaatgattagcgggcagagtgtgagttagcagagaagtgctgctgagcagaggtgtttgaaggctggtgtggtatacaaaagagatttttacgctgctagattttgcaaggaaacttaaggtagatggttgcccttgggcctgcttttttcccactcctgggtcatctcagcctggctgcagcactcccacagtgaattaggctactaccctctctcagaggagagtagaattttggagcagtaggtgatgttggagcttattttatccaatcaagaatcagaaactgagacccaaggaagttaactgacttacacccaagatcttgtaagcagcaaatggcaaaaatagtgctttaaactgaaatctgcattttcgaaactgcattcattctttcttccatctctaaatctgactgtaacctcaaaccttttcctcctgtgtaccttagctgtcatctaccttgtggtcctaaactaaaacccctgtctcttctacatacgtccctaaatccagtcactgaccaagtccaattgatcttactaatttttggaatctgtccacttaatcttcatctctactgctactcttagtctaggtccctctctttttacctggattattgaaaccaccagttagtctccctatgtctagtcttgactccttcttcattctccacacagacgtaacacaattccatttgtgttcctgttctatgacaccccagataggcacccactgcgttcaagatgaagtccaaactccaaaatgtagcctacaagggtctccatggtctgtacactgcttacctctctgtcctcatctcccatcatgccctgctttgttctctgtgctccagctggcagccaaattatgatgtccattatacagggagatataaaaatataaagggaaaggaaatgtgaggctagagaattgggagaaatagagtcttgttctttcagatactaaaatgcactaaaaagctgtaacaagcaggggtgttactgctagattggtaaactagaatataaaaaccagaaacaggccgggcacggtggctcatgcctgtaatcccaccactttgggagactgaggcgggcggatcacaaggtcaggagttcgagacaagcctggccaacatggcgaaaccctgtctctattaaaaatactaaaattagccgggcatggtggtgagcacctgtaatcccagctactcaggaggctgagacaggagaggttgcagtgagctgagatcgtgccattgcactccagcctgggcaacaagagcaagactctgtctcaaaaaaaaaaaaaacagacttggatatatttaagaatttagtagatgatcggctgggcagggtggctcacgcctgtaatctctgcactttgggaggctgaggttggtggatcacctgaggtcaggagttcgagaccagcctggccaacatgatgaaaccccgtctctactaaaaaaaatacaaaaaattagctgggcgtggtggcgcatgcctgtcatcccagctacttgggaggctgaggcaggataatcactggaacccgggaggcgaaggttgcagtgagctgagatcgagccactgcactccagcctgggcaacaagagcaaaactccatctcaaaaagtaaaaaaaaaaaaaaaagaatttagcatatgattacatggcattttaaatcaacacgggaaaaagtggacttttcagtgactagagttgtgatagttggttgactagctggaaagaaagttaagctacgttccaatctcatgtcctacccgcaaaatgaactccaatgaattaaagacttaaatgtgaaaaagtagggctacgtaagtactaaaaaataaaagtggacatacataattggatgacgaagtcattataaactaacacttataaaagccacattttataaaggaagataatcagattagacaacataaaaatgttaagcttatctacagttaaaataaaccttaaataatgttcaaaatttagacaaatgactaactgggaaaaatatgtttgtaacatataggacagacattaggttaatatcctcataaatacatgaagagctttgattaatcaattgaaaaatgatcaattaaaaattagaaaaatattaaaagacatgttcaagtggttcacaagagatattaatggccaataaatgtgaaaagatgttcaacctcactaataaagacatgcaaatgatttaacatttttttatttaccgtatctgcgaaagttaaaaaaaagtatgataaaacccagtagggcttctcacagatccatctccgccaagcttgttatattggaggtgagaacttcttactgttttttgctttttttattttttatttttttattttttgagatagagtctcactccgttgcccaggctggagtgcagtggcatgatctctgctcactgcaaccttcacctcccaggttcaagcgattctcctgcctcagcctcccaagtagctggtattacagaggtatgtgccaccaggtctggctaattttttgttgttattgtattttttagtagatacggggtttcaccattttggtcaggccggtctcaaactctgactagtgctaggattacaggtgtgagccaccatgcccagcatgttttttgcttttttttttttttttaataacaactttattgagctataaatttacatattatctcctggttttttttacatgctaaaaatgagctaatttttattggctaagctattgtctttagtgagacagtttagtaataccagcaataatgtaaaggcattgttttttttatttacttatttagagacagggtctcactctgttgcctgggctggagtgcagttgtgtgatcactgctcactgcatccttgacctcttgggctcaagcagtcctcccacctcagcttctcaagtagctaggactacagatgtataccaccaggccagctaattttttattttttgtagagacagggttttgccatgttgcccagctggtcttgaacacctggactcaagcgatctgcctacttctgcctcccagagtgctggcattacaggtgtgatccaccgtgcctggccagcattgttatttttagagtttacttagtagtatctctgcactttataagcaggcagttttcttttttttcatcttctgaggccagagaatcttaaaatcattctttgggagattacttatacaaggaaaaaacctggaagcaacctaaatgtctagtgataggggatttattgaataaatcataatataatcttagaatattatatagttatttaaagtgatgataaagaatgaaaattattgatatggaaagattaatgtatagtgtgccagtgagaaaagcagattataaaactgtagagtatgatcttgtttttgtatgcatattacatatgcatttgtacaagttaatgcctagaacatttttcaatgcttattgaaaataattagatttttttctataaaatagaatgttgagacgtctgggtattgggatttcaggttatttgatcttattatttttaaacagccttattaaggtatagtcaaaggattttagtatattcatagagttgtgcttcagtcatcacaattttagaacatttttattatccccagcccaggctgtagtgcagtgatgcaatctcggctcactgcaacctctgcttcctgggttcaagagattctcctgcctcaggttcctgaagtagctgggattacaggcgcctgccaccatgccttgctaatcttttttttgtatttttagtagagacggggtttcaccacgttggccaggctggtcttgaactgctgacctcaggtgatccacccgcctcagcctcccaaagtgttgggattaggggcatgagccactacccccagcccaatctactttctgtctctgcagatttgcgtattctggacatttcatacactgtgtgatccttgtgactggcttacggttttcaaggttcattcatgttagggcatatatcaagacttcgtgtccttttatgtctgcataatattccattgtatggatataccacattttgtttatccattcatcagttgatggacatttgggttttttccattttttggcttttctgagtaatactgctatgaacatttgcgtataagtttttgtgtggacataatggggctgtttcccaaaaaggggctgcacttttttacattcccaccagcagtgtaggagggttcctcactaatacatgttatcgactgtcttttttattattcaagtgggtgtgatatagtgttccacttatttttgttaatgtttattttctaatttttttcaataaacattgtcacttgtataattttaaaaatgttttcaaacacgaaggatgtgagaaaatgctcacagaagaaggctaagtgaagaaagcaggaagcaaagctagtctttccagatgccctcaattttgtgaaaataatttgtttaaaataataggtagaaatgattgccttctctttgccaggctctgtgcagtattcttgactctattctcttatttagtcttcatgaagactctaaggtggtgaaagggaaggcttgatggggttcagtcacttgcccagggtcccacagctgctgaagagctgtgatttgaccgtggtatgtggccaccctggctcactggcccaatgtgtctttccttcatattggaaggaaagataccgcagtgtgtacatagtggtgattccagtggaggggcttgcaggggggtgtttatttctttttatgttttaaaatattttctcccttccttataaatcggacaaaaaatacatttaaataatgtaataacccaagattttattttgtagtatttacattaatcattcctttttttgtttactcataaagggcttgtaactcagtattcactgcattagaaaacagtgaagatgcaattgaaattacaagcgaagaccgttttatacaggtttgttattttggaaatctgtctttctggatttcttgttttgctttttccaacttttaggattgaacctctccaatatgatttttttttttctttttgaagtttaggagaccagtttttccttcgaggattatcagaacaaaatcaaatatgtaatttaaaataagctctctatagattagaaaacatactaataattaaggtgctagaaaatgcctgtagaaatgccacatttgcattcattatttccactagtttgtttatttaacaaggagagactcactgaaaaggatgattgctgggggcttgggggtagtgctgttgtacgaaggggaatgccctgaccataggtctgcaagtacaagtctttcacctttctcactgtttttgaagataatttgcacttacagaaatatactagaaacaactaaaagtttcagaaataacatacctagtaagtgctgaataaattacacattattagcaaagtgggtttatatgagtgacttaaggcaacatagcttaatgttttcagataacagcaaaaaagggagttgcaccagaaaaagacattcattttgtctgagaattagctccactttggagctctccagtctttcttacttctgggctctccagtctttcactttaatatgacttgtgacttccttgttgaagaggtgatggtgttgactttgagttggtgccctgagaggcagcgtgggccagtgtttgagggcacaggctttggtgtcagacgggcctgggctccatcctgcttcagctgaacaactttgggcaagttgtttaatccagctgaatctgctttctcatctgtggaaatggaaataatattagtaagaacaacagcctgccttttgtaaggatgtcatgaggactaaatgaattaatgtatgtgaagtgtttactatagtgcccagtgaggaaaatggaccctgacagatagtatcaattattgttttatcatcatcatcattagcacgtgcacagttttcccatgtattttctgcttatcttacagtcatatctgaaacttaaccataaagccttacatttgtaattacttcttagttcatagcctgctttccatacacatcatttattcgaaccatatgaaagagacaagagaactgtttcattcccatatccggataagagtctcagagggattaagtgacttgctgaggtcaatgtgtggagggggaggacagcctgagtgttttgcactctacctggtgctttattccatcatccccccacccccacccccatctaaacagccctgttgtagcagctcctggtttggcgctgtgcacatcccttcctctgcccctgttgaagtgggagtgggcctgctgccctcctggagcctcaggagaacatagcagaaagcccagccgggtatcacccaagcagaagctcgtctgggctccagaattcttcgtgggttatgtgcttatggcttcacaactgccacggtgaggtccaggctcctgagctttttctggggaaaaacctgaagggcttaggtcgaagacctttgattgtcctctttttcaaaatgacttttaattcactttatgttttttcttttgtctcccttcagtatgcaaatcctgcatttgaaacaacaatgggctatcagtcaggtgaattaatagggaaggagttaggagaagtgcctataaatgaaaaaaaggctgacttgctcgatactataaattcatgcatcaggataggcaaggtaagtaagaggtcagtgccttttttaactttcacaacacagagagaaggaagacttagtgttcattgagtactaccaggtaatcttaatcttactcctcccagcagcccagggaagtatagggaatgttatccctgttatatccattttgcaggtgaggaaactggggccaagaaaatatataatatgattagccaataagcaaagtaacttgaattgacacttaacaatcattgtttttatctttgtagtaagttaataacttgatatttctaataattggtcttcttagttgtagatgttggcaaatggttctgggtaaagaattgccagtaaggcaacacattctcagaaaacatctgagcccaagatttctccaagcctcgttaattcattgagcattttaaaaatgccttctgttagccagacactgtgctagattctggtatggaaagaagagcaaaacaaaaattcctgccttagagagctcatattcaggggttggaaacagacaaataaaagtaactattattcaataatgtaagaagtcacataatcatggtgctgaaggaacaggcagaagaaaggcaggctcagtctgaaaggttatttctgtgaaccacagcctctgatagtgcctcactgtgacagattttaaaatatgatgagaaggaaaaggctactgcttttcacaatcattcatggtcctttctgctggacttttttttttttttttttttgcttttggaagttgggtagagactattaatctgattatttcaaacatttgaaaaattggtgacttgtgcagcctgctctgtggaggcactgatggaagtgatactgtctcccctatggcatttggctagttcctatcttgtagcacaaaacagcagcttaccacaggggcagggtgctgtgcaaagcttatactccgctcatcttggaccccatgaagacaccatgaatgggcctgtttttcttgcctttcctatgcctctgagcacacaacattgccttgaagtgagaacaaggaaataataggccagctgcaggggcccagtgaagccctgccaggggaatgacaaaagtaggcactgctctattttgccttcaacttttctgtcaaggattttttttgttgttgtttttttttgttttgtttcgtttttttactagagggagtggaaggtcctctagaaagagaggtatgaaggctgagatggatgaagagaccctcaggtgctcaggtgcaccatgtaggtgagggcaagtattcctttccatggttgagaagagcatactcagaaggaggccacagagcagcagtcatccgagaccacagcagccatggtgggggtgttaccatgaccacctcaatcctggcatttaggttccttgctgctactggatgagccagtggttttgttgtgaggttcaactgggtatgaaccaggatgggccttgtacaccttgatgtggcagaacttccactgaggcattccatgtccctctcactgaggaggcaagtagaggtaaggaagggatgtgctataagtgctgggctccatccagttctgtgtgaactgtgtctcacctttgctggggttgtgctcttgggcaccaggtaacaaaagccctcaaacttgaatagcaagagacctgctctctaaaattatacttattgtgagcaaggaataggaaacatcatcaaattattgacccctatactgctttccttttttttttttttttcttgagacagggtctcattctgtcacccaagccggaatgcagaggtgcaacagccttgacctcctgggctcaggcagtcctcccacctcagcctcctgagttgctgggaccacgggcacatgccgtcatgcctaattttttaattatttgtagagacgggttctctgtatgttgtccaggttggtctcgaactcctgggctcaagcagtccgataatcggccacccaaagttttgggattacaggtgtgagccactgcagctggcctgtactgctttatttctaaaaagagcctgggtatttgtttcgtttttcacagtttttggggagcatggaaaagcaacctttgtcctttgtcaggaacctgctggtctatgggcaacatggcagcagggcaggccgctgagctggcctgtgttttgaggtgaaagaatccataattccatctccggggaacagggcttgttgaggggtcagcaggccttatggaacagtggcactgtgatcaggaaggggaattcaggcatctgctggagaccagcattgcagaatggagacttaggaaatggccagatggctaggagttgggaccttggagtgtcagatgctaggtgttggatattgaagtttgaccttggggcagaagagaaattttgctgatgttcaagcagggaatattataaacattttccatctccacaaaccctgctgcccattgttgtcagtggctcctcttttgggtaaaaataacaggtatgttgatttccagcccccgcacttaggcttctttgcatcctatatgtatatccacctgactcttctcttttttcttcttccccaagacttgtctatcagggctttagaacccatagtctcccatcttctcagatacctaaactttatattgtcaattctcttttagagatcttttttttttttcttgagacatggacttgatctgtcacccaggctggagtgcggtggcacgatcttggctcactgcagccttgatctcccaggctcaagcgattttcccacttcagcctcccaagtagctgggaccacacgtgtctaccatcacacctggctaattttttaagcatattttttagaaatggggtctcactgtgttgcccaggctggtctcaaactcctaggctcaagcagtcctactccctcagcttcccaaagtactgggattacaggcgtgagccaccatgcttggcctcttttaaaaatcttgattttttttttccctccctcagaaactgtgtgttcttcttttgtcatttaatgggtaccaagtaaatggtggctacttagatgcctaagatgatgatgtgcagctgcagaaatcttcagcatttcaaaacttttaccttcattagctcctgtgcctttgctttcctctcactgtctccccttttcctactcttcttccatttcctcccagatttaccagaactctggcctttgccccctactgttgtccctcagaatgttcctttgttgttgaagtatcttttctgctctgtgtagaaatctcacacttctctggttttagtgtcagcctcttttccaaggtctggttcagcatcctactatcatcttaattgtctagcaatggttttctctcatctcccaaaaacccaatctctcttccaaatcctgctgtctctgctcatggacctacctcacagttgctttgacttagattcctgaaatggttttgatcccttcctccccgttggtcccctccatcaaatccacaagcattgatggctgttaaacccctgttttgagggtccattgcctgggcctgaccttgctcagggccttcttcccacactctggagttacagtgtgtaactctgtctccttgtccggaatcctccatctccactcggtccaccatacactactgcctgattagtcttactgagtcatcattttgtcatgttgcttcctcagcatagagctcatagtcctcagcttggctgccaggattctatagttgaacctcagcctacctttcccattcagtaacaaaagccccaagtgttctttgacagtttatcatgtgcacacactgtgcccaccctggggataggatggctggatgatgatgatttaattctcaagacagcgggtgccaagagggactgcatcaatagcttggtgcatagcttgtagcagacagaagggaggtaatagtcttactcctgttctgaggggagcttggcctggagaaagaggcctatgcaaaccacctgcacccaaaccagctcatttactgaatgtttactgttatgtcaggactttgctaagagtttatgtgaattacccaacctaatcttcatggtagtactctaaggttgtactattattattctcaggaactaaatatatatatattttttttcctcaagacagagtctcactctgttgcccaggctggagtgcagtggggtgatatcggctcactgcaacctctgcctctcgggttgaagcaattctcctgccccagcctcctgagtagctgggattacaggcgcctaccagcacgcctggctaatttttgtacttttagcagatacgaggtttcaccatgttggccaggctggtctctcaaactcctgacctcgtgatctgcctgcctcggcctccagaagtgctgggattacaggcgtgagccactgtgcccagctggaactaaatcttatatgatatttatgtaagtaaatattttttgtttcctctggtgactggaaaacttattgactctgttaccctagccaagccattgcctaaattgtcctgctcctttagatggactgtggaactttgcctggaatggcctgttagccttgacttgggatcgctcagtcacccaagtctattcagaaaggacaagaagatcctgaatatatatatatatattttttttatatatatattttttgtttttgtttttgttttttgagacggagtctcgctctgtcaccaggctgctcactgcaacctctgcctcctaggttcaagcgattctcctgcctcagcctcccgagtagctgggactacaggcacatgccactacacccagctaattttttgtatttttagtagagacagggtttcaccacgttggccagggtggtctcaatctcttgacctcgtgatccactcgcctcagcctcccaaagtgctgggatcacaggcgtgagccactgtgcctggcctgaatatatttttttaaatgctgactgattgaattggtccctgtaatttttttctctctctttttttaatgtaacagttttattgagatgtaatttctatgccatacaagtcacccattgaaagtatactatttgatagctgggcatggtggtatgtgcctgtggtcccagctacttgggaggctgaggtaggaggatcacttgagcctgggaggttgaggctgcaacaagccatggttgtgccactgcactccagcctgggtgaatggcgagaacctgtctcaaaagataaagaaagtatactatttggtggttcttagtatattcacagttttgcaaatgtcacaattaatttcccatattccccttgatagtgagctttagaagtaacccttagacctgtctgctgaagccttccttctaaggtagacatgcaagttgtggacatggaggacaacccacttatttctgcctagggaaccctgtttagtccttggtggctttggactacaagcctcgtcctgtgggctgagctccccctcagaactgtaccaaggcccatacctcccttctactccagtgtgacctaaggactcagctgggctttctggctgttttttgatatagcccttttttggtgcccattgttttcagaattatatcagtaagcatcagtaatcatcctttgattctatcggagtattctggtttctttttgatctgctttcccagaggagtctgaagatgagctcttatcattggtatttggatgcaggttgccatgtaccaaacaagaatatttcagaattgacctggagtagggctctggatagcaaacctcagctaagccaacaaggctgccatggtgcttaacacccagcctgggtcaactctaggtcctgagggactctggaaggctaagaaaggttatggaataccctaggggttcagtgtcctgttgtgggttttagggatttccatagtttaagggccttggtgattttcttggaggaattcataacattttaggacggtgacaaaacccagctccatcctggctttccctaccaccccaagataaagggagtcaccacagcccggttctcttgctgtggtcttgttctgtgtagccctctttccccaggctgcacttcctgtctgaaagaatccccacgttctgtgtctgatcaggagagcacagctaatgtgatttcagccctgggttttgaggtctcgtcgtttgttttacttgagcttggtcctggctgttatctcatcctccacaccctatatacagggggtgaagccttcacacatcccagaagggcctcaagccatttagttcacctcagaagccggtagtggccacataatggtcccttctggcccccagtctggctattcttcccctcccaaacacaggggcagaggctaagccccctcttccacttcagcaggtgggagttatgagaggaggaagtaagggggagtgccctttatttgggggtccaggacccctcttgtctgcagatggccactgaaaatatatgaccacttagactatggtgacctgacttttgtcagcaactcagaaggaggtggactttggaagttaagaaagaattgtcctattacctgaaatcagtttggggttgggatcattttttatcttaattgctttagcaatgtaagtgaatcagaactgaagtggaaaatgttcttgggtttatgttttcaacacaaagtatgacgatgcttacattccatttataggagtggcaaggaatttactatgccaaaaagaaaaacggagataatatacaacaaaatgtgaagataatacctgtcattggacagggagggtaagtggaaaaaacaagtacatcaatcaacatacagtgttttgggttattgcagaatttgctttgaatatttaagttaaggactgctgacagaagtgtcaaggtcaggtgtcatcacagaatggccttccagcatagtgttttcttggtgacttcctcatggctacagtctgaccctctacttgcagcccagagccaacatactctgggcagtcttgtttaagctgcgtggatacacaagaaactgaagtatttgtttaagtcagaatgtcactttagtaagttgtgtgataatactgactggtagactccctatattgaaaagattttttatctaatttgataggctatgtattatttctgcagagacctatcaaattagataaaaatattttaaatactaacagttatggacattcctatataaaacagatgtgactgtagattggaaaccagtatatatcaggagcctaaaactttcagacagtttatctcagaaacctatcttaaagaaataatatggtaagatgaaaattatgaatatgaattatagaacacctaaaatattgcagccattagaaatgatgatcatattcacaggttctaagatgagggccaaaaaaagtagaaatgatgatcatagaaaattaaattacctcatgcctgtaatcccagcactttgggaggccaaggtgggaaaatcccttgagcccaggagtttgggatccgcctgagcaatatagtgagacccccatccctacaaaaaatgtaaaaattagctaggtgtggtgacacacacctatcagttacttcagggggccgatgtgggagaatcgcttgatcttgggaggtcgaggctgcagtgagctatgatcatgccactgtactccagcctgggcaacaaagtaagacactgtctcaaaaggaaaaaaaaaaataaaatatgagaaaggttatgatacaatgttaaatgcaaaaagtaaaatgtaaaatgatagctagtgtttaatctcaatcatgtaaagaaaagaaggaaaaaagaacaggagaaagtatggcagtggccgttgtagtaaccgctgttgtttaattgagcccctcccttcctggccagttctcaatgtgtggtaaatgccacttcattccatcctaactgcagccctgtgaggttgggactgtgatcgtctccactttacagatgaggaaactgaggcttagagaggtcaggtttctagcccaggggtccagctgccagcgtgaggcgcagccaggctgcagacctcagcactgactgcacagctcacgtgctttgtcaccaggctttgctgccagttggtgatcgcctcagggagatggatctgtgtgggttctctgttctgattctttgcccttttatgtcctttccaatttttttgtggtaagtatatagggatttgattatcaaggggaaaaagtgaaaaaactgaaggaacaataaataaatgagaagagtcagcagcctctgagctaagccctcgttgctttgttttagacatctagctaaccacgttcagtgtgaacctcaactcccagtgtggcccgcggctgtggccaccagtgaccgtgagcagattgtttgttggaacttgaagaaaagcatcaatgtaaagggttgtgaaaataaaaacatgttaaggaactaaaggctctcagttggttaacatgcagttcattttaaaaaatatgtatatttgattgtctcatgattaattgggaagaattttgtcatttttactgaagtcacttgtacagagacgccaaaggatgtttgtgatctcttctttatttattggtggccttggtcacagtgagaagaaatgttctcagagcgttttgtgtattgcaaaagggaggtgccattttcgtaatgaaaaattaacgacatatccatcaaattagagactcagaagagaaataatgcattgttttttacttgcagaaaaattagacactatgtgtccattatcagagtgtgcaatggcaacaataaggtacgtaaggagagccccccggggccccaggaacaccccagcaagattttcagcaatcagaactaatggcttttaaaattcacttttaggctgagaaaatatccgaatgtgttcagtctgacactcatacaggtacggtgccccgtatttattcttagagttcattgagtttttggagaaaaaaaataaaaacagatctttaactagcttgcctggtgtaatggtgggattttcctcagactgtggcaacatttctctccttgactccccaggctggcttatgagtcacttgtacagaggacttgagcgcttgtgagcattctgatgggtgccctggggcgggtctctgagcctgcgagggaaagaaatggtcaactgaaatgcatgaactcatgtgaagtgtggttttataacctgatttatactttaagagggttgagtgtttatcccacagtcctttaacagggatgtcttcatctgtcctgacacttaccactgccagcctgcagggaggtagccaggcccctcgcacttgcctcacctctatgtttcttaaccatgccttggacaccatctgttcttccccatagctttcttactgcaaatgcatttccctggtttggagtcacctgtttccttcaaacgtgtcatgacttcagcaagccacttcctgttctggccctcacagatgaaggggctgggctgggatggtgaagcgccactccagcttcaggcaggaggtgctccgtcaagtgtctgtgtagacacttggcgtgccaccctgccttgcctgagtagtgtgctctgcttgcccatgtggtctgtaagagcctctaaggagaagacttcccttcatgctgttggtgacatgctttctgccttaccagaacagttcattctttcattctagaaacacttactacatatttttgtgagcacttaatgtgtacaagatacctgtcctaagtgctttaggtacagcttattttaatgaagccttagaataactcaaggaggtaagcatttttaggtgaaattctctttacaggtaaggaaactgaaagtttaagtaatctgcccaaggatctccatttaggaagtggcagagctagcacctgaatccaggaggactgacactagggctctgaagcacagtttttatgggtgccccaggagcaatcagagatttagtctgaaaagagagacacattgacacaaaggaacacagcaagtgataagaagtgatccccaggaatgagaaagggcagtgggtagtcttctagacagggagaggtggatttgaatagaaaagaaatgtgagcgggaaagcattccagcaataaaaacaggcatagaagggggaaagtacagggcatgttccagaaaaagcaagtactaaattttgacttgtataaaaggtcaatggggaaagaggtatttgggtcaataagaatccttaaatgctaggtgggaagtttccattttcatctgtggacagtgggagtctgaggatttgtgagtcagggagcagcgtgatgacatctgagctttgagaagctcttagagcatgtatgtaagattacatggaaggagacaccagagagaagaataccagcattgccatggtcgagaggaaagaaaacaatggccagggaataataaggtgatgacagtaggaagagagaagagagaccagatgtgatgatggtgtgggactagagagagaaaagcaagaaagtccttgaaaaggttgtttctgagcctggagattcaggcagtagcagtagggctggggaggatgaatgtggagagctctacctgtgaggtcctggtgggcagtcaggtgggtttgtttgttcacccctttgcccatttattctacagatttctgttgagtacctgctgagtgctggcttctgtgttctgcaaagaggttaggtctagagatgaaaatgtttctggccagccaagcattagcaagtagcacagatgtggaagtgatggaaaccagggatggtaaaggggaatggaaactttgagattacagtggaagagaacagcaagaaaaggagaggaggggtgaggtggattcctagagaccacccacctccagagaaggaggaaacagaagcaggaaaagaggggttagagggacgagggagtctggagagcgttgctgaagctgaaggcggggagaacgggaagcatcaagactggtcagggctgaagcacacatagggagggagggggatatggagccagagatggataaaaacttgtgctttgcattcaagagctcgtgtgtgacctgcagacatgcagtttcaggagaatggcgagggcagaagccagattgcaggggctggaggagtcagagtagaaagcagcatgtgtgggcctgttatggagagtcctacaccacaagttcacagggggcttttacttggttgtaagcatttttttttttttaactcttaagaagagtaccatagggctggacgcagtggctcacacctgtaatcccaccactttgggaggctgaggcaggcagatcacctgaggtcgggagttgagagcagcctgaccaacatggagaaacctcgtctctactaaaaatacaaaattagccaggcgtcgtggcgcatgcctgtcatcccagctactcaggaggctgaggcaggagaatcacttgaacccgggaggctgaggttgtggtgagccgagatcgcgccattgtactccagcctgggctacaagagtgaaactccatctcaaaaaaaaaaaaaaaagaataccactgtaaagtaggtatgactattatttatattcctttattacagaggaagaaactgaggctcagaaaagttcaatgagccaggtgtggtggctcacacctctaatcctagcactttgggaggccaaggcaggtggatcgcttgagcccaggagtttgagaccagcctaggcaacatggtgaaaacctgtctgtaccaaacatacaaaaaattagccgggtgtggtgacacgcgccagtagtcccagctacaggggaggctgaggcacgagaattgcttgaacctaggaggcagaggctgcagtgagctgagatcgcgccactgcactccagcctgggcgacagcaagactctgtctaaaaaaagaaaaaagttgaaagacagcctagagttgggcagccgggatatggcagagctgggactgagaggcagagtcagtgatgcagtcagaggaaatgttcggcagggggagcatctcccaaactgcatttgtaccagggcatttggtcgttttacttggtcaccgttgacttaggagttttacccatcccacccaggtgagccacttgcccatcctacctacccccttagcagcataaccacctttatgtccaaaggtctcaactggccatcttcacttgagaaggcagggtggagctgttataggccatgggccagccaaagtccttggttatacacaacagaaatcaattcttcagcagaaaaggagttttttctggaaggaaatagggttgcttatagattggacaacaaagctctagaactagttttggaaaaggaagcaagaacctggggaagctgagcaattgtccccactgccgtaggcatgccataggagcactgtgcttagggggccactgctgtcactactgagctttgagcaccactggccctgttgagatctggttatagggtgttgctgttctcaccacgggtagcatagcttcttcacacctcgcttccttacctcactcaaaagcagactcttggaaggaagcactcatttgtctgggcctgtgtcacctactctgtcactaactgggtatggagcagtggagtctctggccttctccctcccctactgagaggacttagtactcccagacatgggaaggaaggttcagggtctgggcatccaaaagagtaataaaatcccaatacatgctcccttttccctggcccatgtgttgttttcacgtgacactgtctcactgaggacaccaaattgtagtgacaactgtccagtctattgacttgttctaggtcaggccctgagcctgactgtaagcatacagaaatgaacatgagtttcgctgtctggtggcaggagaaaataatttgaatatgctgtggtttgtagtaccacactggagaaaagctggggaatgcttcccagcaatgatgatgatgatggttgacctggtgtctgaagagaagtaggggtcatgcagaggacaagatgggagaagcagcacccataaaggcatcgcgaagcgaggctggggcaggccagtttggattcatcctgtaggcagaggaagaccaagggaatctttataaataggtaaatgggaaagggtcaggtcttaggaagacagtcatggagaaaagagattgaagacaaagtaactcctgaatccagcctcaggagcccaatcagagactggattcaggagttacttaagtataatcagtaggatttgggaaccagcttactgtgtgggataaagagaagacttcagaatgacaccaagatatctagcttggccactggataacattagttaaaataacaagtgcaaataagatcgtaagaaagagcaggtttgtacagggagtggatagtaagtttagatttgaacttaccacatctgaagtgataagccaaaacttttggccctgggccaactattctgaagagagaaagtgaggcaggaagactgagtaccaagaaaggagtccagcaataatagacgtgaataatggccaggggagcactgaggagcaggatgaattcattcattcatcattcatccaaactcagtgcagttgtgtctctgcttgcaagatatgtttctatctgggggtgaggtaaacagtaagcaaataaacatacagtatatcagatggtgctaagttctgtggagaagaataaagccaggggattgggcatgcaggggatgaggaggtggtcaggacatgccttgccagtaatgtgacaggctctggttcttgttcaggtggtatggaatggaacccaggcctcatactttgcaggtgttctcatgggctaccagggttggggccattgttagaggcctcatagatgattgaaaagagttgggagatttggtctgtgcctggagaaagtgagctttcttgggaggaagaggtagttaccagaggcccatgtgcagagagtcctgtgggcttggcagtttggaggtggccctgttgcagagtaagtgctctgcaaatgcttgttgatagtgcctgaggagatgttccgacagtcagctgtggtcccggcagaatgacttttgggcaagtcacataaaatactggggtctggacttcctcatatccaaactggaactcatacttccaggctgcagggctaatgcgagttggaggaagctgctgtttttgaggggtactgattggttatcctctctcatcacccccactgtttttccagggtttcctggatttacccagcaggtcaaggaaatgctattaatttttctgtattgaaagggtgggcagagtttatggaccctattttacagaacaggaagccaagagcagagacatgaagttgcaggtgatcctgagcccaagccctggctatggaggcctagttagtgttctctccactggcaggccggatacctcaggatgagtatgtgttttctgagcacccagtaagcatgaggccctgggcgcagcacgccttcaggagctggtagtctcattgggatgtaagcctcacacttcatcttcaacctcttggtgttccctgaggagagcttctgagagctgggtgctggggtgacagggtggagacgtggtccatctctacccactgggcgaaaattgctagaatcatctataacgtgctacagggactaggggagcagtgagcttagcagggcttttgggaacaagaggatcttgtatttacataaagtaactttgaaacagtcaagtagaaattaaagcctggttagtctccctccacttttcacagtgcgtccttcatacaccctctgctgcttgctcctctccagccacactgctccatctgcacaagcagtttcctcctcctggaaatgctgtcgtcctcctcctcatcttggctgcagctacaagactccatccatctcctttctgcccccactcccttgagaatctgccacttccccctccaggctcctcctgaacttcagaattattactgtaactcctagtttacccacccttttccccactgaccatctcctttcgagttcatggactatacctcattcattttcacctccctaatgcctagcttagggcatcacacatggtgggtgaaggtttgttgagtggaataaaagagagaagaatgaaggaacaaataatcataagttctcagtccaggctcatcaggtggctatgtggacattactcatcatgaagctcagaggaaggagacacatttccagctccatgtggttgagaagaggggaaatttgaaggaatgaacacttggagagggtgcagtgttgtgtctcagacagaaggagccggtgtcaaggctgttccagagatggaaggcggagcagttgtgctgatgcagtacattcatgggaaacagtgagagatgaaaggcaggctgctgcaggccatccttacctgcccttgaatgccaggaagttctttatctctgagacgctgaaggattttgagcaggggagccacagaatcagagtggctgatttaacagaactttgatttgtgcacaggaaggtgcaggtttttggtgaagcagatgtgtatttattgagcttctatacacatatgcttcttccagcagatggtaggcacagagctggtcacctaggaaagacaggaaaaactgtccctgccctcaagtcattcatgttagcaaggaaggcaagaaggcaagacaataaagcaggctgttacccagcactgttggggtggtgtggagagactttaagggaaggtttcccaaaagttaggatacctgaactgcatcttcaaagaagatcagaggtaaccaggcgaagaaggtggcaggggagaggcacatttccaagtaggtggtttgtaccaaatcatagaggtttgggaggcaaattaacaaatcataaatagttcaaggtggatagagataggaggtgcagacctcataggactctgggtgccacactgaggagtttgaatcttatcctaaagacaaggatgagccattgaagtgttttgattgagagatctggttggatttttgttttacaacgatcgcttggctgcctgcagagaataagttgaaagggataaggttggtgttttagaaccaatctgggaggccattaatccagggaggatgacaaatgtctgagcttggacagggatagagcaggggatagactggaggtgtttaggaggtagaatccttagatttggctgacccagtggaaggagaggggagggggagaagtgatggatgacttctgtctaccttatggtacatgctgttcagtgatctgggttaaagagcagatttggagaaagataaggacttcatggtggataatgaattcatttgcagtgcctgaggagtgtctaagtgaggtggtaaatggtaagttaagatgtaagtctggagctcaggagagaggcctggggtaagatggcaacataggaattaattaaaactataggaagaatgagatctcccaaggaggttttgttgactgagaagggctaaggatagaaccttttgaaaaaccacctttggaaacaccaggggtactgaggaaggaggaaatcatgaaagaaactagaaaggagtagtaagaagtggaaggaaaaccaggagagtgtggactctgcaaacagaagtgtccagaaagggatcagttgtgtctagtaccacaatcaagtcaggtcaggtaaggattgagttgtagccttcagatttagcaaaaaggaggtcgttggtgaccttgacacattcactctttagtgcccacagagaagaggatttagtttaattgggcaaagaagcaaagagcaagtgaagagccttttcgatggtgcaaaggaagtgctaagggcctacattcggatcctgtacatgagcagggagagaagttccaagtgaggaagccaagacaaggcagagaagctactccatggctgtgggaagagctgagctcagcgcccaccctgctatgcactcatctgcaaagcagctcctagtttccttgtctgtgaaatggggatgcatggtacccagcaggtgcacagagaaggggtcaggaaggtaagtcagagttgccttgtcagtgattggtttgggggtcaggattagagaagagtcaaagacagtccccgtttgaagcctaggagagtagtgtgtccttcgtagagaagagggggtgaaagggaggcagatgagctatcatttgaaatatacctcaaacagtgttcaccatactaccctaggaaagagaagaatgttttccctgggatattgtagtccttattttgtagagaaaataaaagattttttttctttggggcaagatgagtggggatcaaaattttcccatcattttattcaattatatagaaatataataggagaaattctcctgaggtcatttctatcagttgtcactttatgtcttgggactctgtaattacataatctggaactgtaaagcccttgtttatctgtgcacctggtgggacattttgagaaactctacccccataaaactggtttctcatagtcttcatctctgtactgtgtttacttttgtggcatttaaaacatttaaagttgagagttttaaaaaaattttagattggtaaccttccttaatatgttgtttaaatatctttgaagaggtgatttatcatttgtttctacagataatcagacaggcaaacataaagacaggagaaaaggctcactagacgtcaaagctgttgcctcccgtgcaactgaaggtgagtgacaaagacaagagaaaaaaatgtgatcaaatcactgttgaacacatggagccctgccctgccttgcccaggctcatcctgtctacctccaattcttgggagaggagggaaccctctggaaactagtgttccctttctccctctctgtggactcctgccaatgggctccattctgagccttttaatggaatcagaaaataaagaaaaggaagaagatacatttcccatatattctatagttgcttttctaaactgtaacagcagaagatgtcagttcatctgctataattgtttgaatttgataattcttaaagatctatcccatcgtggtttgcagtttgccatggaaacttttagagagaggtgagctcgattttggaattgtgaaagacccttattcagcaaatatttaagttctaattgaaatatactttttaaaaagaatatgtaagtgcatggtctgaatgacttagtttttgaaatgtagtcaacattgtttatacagagtgtggaggcaggtattgctgctagctgtatacattctttggcccaaaaatgaatacagaaggatacagagctggttgtactggttcaaaagacaaacttttccaaggtgatatcagctaagattatacagtagggatcaaatgctaccctctcatccctcacagatttgtggtaaggcccagatgacatgctgtgtactccttgcactggaaagaccatacagattacacccctgctttgagggcaggattggggtggtgccagtgaggaagcggtatggggttatgggaagactgtaagctttggtgtcagaatgacctcagtccaagtcccagcttcatctactctctgtgtagccttgagggtggacttctgtgtttccattgccttatctgtaaagtggggataatttgctgtctgcagaggattgtgtgaggattcaatgagtgtgtatggtgcctggtaagtaagggtagggactcagttagtgttagctgccatcgtcatcttcattgtagctgtcgtgattacagtcccagaccctctgcagtcctggagcagcacagagcagggctgaggtccctgcccagaacagtcttcactcaccacatgctaatgtttgttgatcctttggattccttggtatatttctgtgttttaataaacatctttttcttataactttttatgatttttgagttataatttatatacaatgaaattcacttaagtttcatttcagtgagttttgacaattctgtatgctcatgtagtcaccacccaaaatagatatagaaaatccacacacacaaacacattattaaccatgcagaagcaaccattgatggctagcaccgtaaattaattcggcctctccttgtgcctcatagaattggaatcgtacagtatggcttgtttgtgtctagcttcttgcactttcatgttttcgaggttcttccatgttgttaggtatgtcatagttccttccttattgctcagtagtattccgttacaggaatataccacaatttgtgtgcacatcttcttcttgtttccattttgaggctgctaagaataagaatgccatgaacatttttatgcaggtcattttttgtggatgtatatgctcatcttctccctagaagtgggattgctaggccttagagcagctgcaaatggtgctctccagttttattctccaataatagctccaacatatggcaccatgttactctcctcactcatctgtgagagttccagttgttccatgttttcccacacttggtaataccagaatttaaaatgttagccactccagtggttttaattttaattttccttatgactgaagttgagcacctttttattggtcatttggataatcctcttctgaagtgtcattcaggtcttttgcccatttttataattgggttgtatatcttgttggtttgtagggattctgtatattgtctagatatgggttatctgtgtatcacaaatatatttttttagtctgttgtttgccttctcccctctaaatcatatcttttgattcttaatcaaagagcagaggttcttaaggaaatttattttatcaggttttctattattacttgcgctttttatgtcctatttaagaaatcgttctttatcccaagatcgtgaaaatattctcccttgttttcttctaggagttttattgttttatcttttgttttaggtctttgatccatttaaaattatttatatctggtgagggtagagatcaaggatgactgcccctgaccctagggaaatccaactcgtctatcaccatattgaataaccatcttttgcagtagcaccattattataaatcagcttactacgaatatgtgatctgttcctggactctattctgttccactgttctgtttgtttacgcttgtaccaatatcacaatcagttacttatatagtaagtgttgatatctgatacctggtagtaggtagctgttcttcttcagtgccttggccgttctaggtcctttgcatttccatgtgacgcttagaatgagcttcttagtttatacacacatcctcctgggatttgttttcagagtgccttaaatctgtagatcacttcagggaaaattgaaatctcaataatggtgagtctttcaaatcatgaacatgctatgtctccatttatttaggctgtctttgttttctctcagcagtgttttacatttttgttgtagaaatcatacaaatctttaattagatttattcttaggtattgatggttttttatgctattgtagtggtgttacttgtttaaatttccaattgcttattgtatatagttatagaaatacaactgatttttgtatattgactttgtatatctaggagcttgggtaaacttactcactgtaaaagaagaggagtgcatttatagattcttctgggctttctgtatacacagtcatgacaatctttatactttttttcttaccttattgctctgtttgatttttttctaattcctttatttttaattgacaagaattatgtgtatttatcatgtatatgatgttttgacctatctgtacattgtgaaatgactaaatcaggctaattaacgtgtattacctcatacactttcatttttttgtggtgagaacacttaaaatctacctttagcaattttcaagaataccttgttattaattgtagttaccatgttgtacaatagatctctgttgtttgttacaagcatatatcaattatttttaaatgaaaacaagtccttttatgacagtgataaaataggagtttttatttttggtttaatgaccttgttgggtaaaatggaaagttggcaatcctataatcaccaaaattttaagaagtttagttgggcccccaaatttaaaacatttgagaccccctgaattggttaactttggacggtgtctctccttgggcctcagtttcttcattggtaaaatgaggttgacacatcagtctctgggacagcccctggtcctgtaacgtctttgggaagcagcatttagcctgataggattgttcgtggagatacccaggactggatgttaacgttttttctgcctatattgcctgggcttctcctcaccccaaaggaaccatatcttgacaggaacaacagaaattaacaaactttagagcctaagaattgctgcctgcctcattgaagatatttacctaatcagtccagattaaacataacagtgggaagcaccagagggtaccttgaaaaatttaaccagaaatttgtgtatttcagttattggtgagttgaatgtattgctcctgccatatatgaaacaaagagcattgtgtggcattgtcttccggaacatttttactcctagagaatggcaagctaagtaattataaaggcttattgtcatagacacaaaaagaggctgtttgacttgggcttgctagattgtttcctctgttttctctctggcctgtgacatcagaagttcagtccatgggggcatatgtgcattctagtgcctagaactgaaggaaacagaattggttatgccagaaccccaggcttgttaggatgggaaggaagctcagcaaactcagttctatcctgccccttcatcatgcagccgagcacactgagccctctgctgtcaagacaggtgcccagagttgtgcatgccctgatttgtgcatccctttctccacagtttccagccagagacgacactcttccatggcccggatacattccatgacaattgaggcgcccatcaccaaggtgaagcagtttgtggtctgtctccattgagcacacatactccttgttctccccaaggatcatttccaatgagaagaaacagggacccgcagtaatgagcatgctgtcatagttgtgtggtgctagtagcctcctctgaagagagaggatgtgtgacatgggcattttaactagtcttaagttagtattaagtactatggccagactgagtcctgttgggttttgttttgtttttgctgttatttgttttttagagatgtgctctctcatttctgttgcccaggctagtctcaaactcctgggctcaagtaattctcccacctcagcctcctgagtagctggaattacagacacgtactgccatgcctggctctcccactgtttttaaggttatgaaactcaagtattttctttccataatgtaggtaatcaatattatcaatgctgcccaggaaagtagtcccatgcctgtgacagaagccctagaccgtgtgctggaaattctaagaaccactgagttatattcaccacagtttggtgctaaagatgatgatccccatgccaatgaccttgttgggggcttaatgtctgtaagtatatttgactagactcttggctagagcctgtctgttcttggttgttttctcagaggttattcacttaaacagatattgaagaggcaggcagggctctgtagggttcagtcaagacctaaactctcctccattgcctgggttctgctattctctggccaagcacccacctgctgcctgcctcctagggagagcttagcttggagcagagcagggaggaatgtaatcctgacagtctgctgagcaccagttctccagtgttgcttagggcttctacagtagtttatctaaataaagcttgtttagttgtattaaagatcttcaaaactgggacagtgtagaacagaaagattgtctttctcccgccatatgtatttaaaatggtgccgggggtgcaacagtttggccttcaaagcatcccacacacatttagatgactgtaggaaagagggatttgggaatctttcactagaagggggctttgtgtcatagactcttgaggggtcctggatgcctccttcagcatgtctggtgtagagctctcacaagagagggacaactttgtgcagcacagattattccattgctctctgtcagcttttgtcttggtcagaagcaaaatccacctccctcccaattactgctttctgaagtcactggattttataaaaataaggttccaggcagaaatctagaaggtagagtgtttacaatgctgataatatctcactgtggtcttgcctatttgagacagggtctcctccagactgcaggtaagaggtgaaaatgatgagggatgggggtaggatagtgtcctggaggcgagcagatgagaatagccacaggactggagaaaaggggctgctgagagtacgggtttgggccaggtggtctggaagcagtggtgaggagcccaggagagtcaactgtggggaatgaggtcacttatgaggtgagagaggagctaatgtttccaggaaagcctcgtgtcctcagagtgaggagggttgcacgaaaatggaggagaaggactgagggcagagcacagttgtccctaagaaaccaaatggtcctggagtgcaagcaagaatgctgggcttaaagaccacccacccctcaaaagatgcaggctcacctcccgggtgttgaccttgctcctgagtttagcttccaacagggccaggaccatccttcccagcattagcctgttgtgctctccagtaagtgactgaggtcagtggtcaatcacaggggtggacctgctgggcccagggcagccttgagtgcattggtggagagggctgccctgagttgtcctgtgggaggaccacctggagtttccaggaaggaaagaatagttgtgacttttctttttcttgtttccttgatttttatcaggatggtttgcgaagactatcagggaatgaatatgttctttcaacaaaaagtaagtttttcctttttaatttcttagatcactgtctataatactgcagtctagcttaagtgatgaaaataatttttcacctcattaagaagtttcttggtatgtcataaagcctcagaaacaaagcagctgtccctgaggcggtactgtcctccctaagaaacagttaatcctggccgggagcggtggctcacaccgccgagatgggcagatcacaaggtcaggagttcaagaccagcctggccaacatggcaaaatcctgtctctactgaaaatacaaaaaattagccaggcatggtggcaggtgcctgtaatcccactactcaggaggctgaggcaggagaatcacttgaacccgggaggcggaggttgcagtgagctgagactgtaccacaacactccagcctgggcaacagagtgagattccgtctcaaaaaaaaaaaaaaaagttaatcctttaaagcctatttgttctccaaattacatcactttacagacactcaaatggtttcaagcaatataatcactcccatctcccttgatgatgtcccaccacggatagctcgggccatggaaaatgaggaatactgggactttgatatttttgaactggaggctgccacccacaataggtgagttcatgcagagctcagcagcgggagaactagattcccagggcctgtgtgaggaggctacctgaggagtatggattgtgcacaagcctggtacctggtcagggtggggccctaaggaaggagtaacagggcaccaggtggctctgagtcaccagggcctgggggagagtctgctggccacagtgatggcacattcatggaaagcatgcaactgagccagtgacttctccaagtagcacaggacttttttctgtgaaataaaggtatttctcctgtaggtggtaatatgttaagattgctgtaagagatctgctcagagcctagaaccaaaatttattagaaacacatacacatgtgataagagctgctcccagcttttggttgttctgttggtgataggcatagggacacccaaagccccagtcatcctcatctgggtgtgatcacagagagtgggagcaggaatggggttttgccttgagttttttcccttgcgggagaagagctgttaaccaaaggtggtagttggctgggcacacaagaaagggaggtccacagagctgattccagccaggactgcccactagggtgtctaggcagaggtgtgctcggttgggccatgggatggctcctcaggtctcatctcagtctgggtgacctgtccccaagataactccctgactttttcaggctccccttgagttaaccttctgatacgttctacttccctatctcccagcacagccaaggagagttgaaaagaatactccctgggcacatgagtctttgagcatctggtttacatgctagtgacattacatccatgtgaattgggctaaggcaggtcagtttaagtcctgtgatcacttctggatactgcctcaacacagccagtttcttggccttcacaggcaagggccagatgctgggtcaaggtgatttctcaagtaagaacctaacttggtggccagctggaaacctcaggggaaatcccctcatacttttaacgcccacctccagaaaggtgggtgttgagaaaattccattgcatacggcagtgtctggcttatatgacattttcaggaaatgttttcttataggcaggatgtctggccaatggcatgggtccagcaagtccaaaggagaggatagtgttcaaggtggtacaagcttagcctggagaaagggttattttgaggaacccactagtgcaagtaggaagctgaacctggaaggacagaatgagcaaactccccccaacaaatcgggagccccaacgaggctgaggtcagagctgctgtgggcagccagctctcacccgtgcatcatggtcccctgagggcaagaagtggaaccagagttggttggccccaccagagagaggccagcacagcccaagcaatctccactttgctgccctgcactctctgaaatttggcttggaacctattcaggccttaaacacttggcctgtttgtttgctttgttctaatattgtggggttttttctgtctataggcctttgatttatcttggtctcaaaatgtttgctcgctttggaatctgtgaattcttacactgctccgagtcaacgctaagatcatggttacaaattatcgaagccaattatcattcctccaatccctaccacaattctacacattctgctgatgtgcttcatgccactgcctattttctctccaaggagaggataaaggtgagctgttgtttacctgccacatttaatgggcaggagcagtggggagagtctagtgcttctgcctccactaagatacatagcatgactgctcacgtgtgcagcctggcacaggaagggcaaggtcatacgaggaatcaggcaggaggccacattagctttgggaaattgatgtgttaattcatgacataatcccagctattccatgagggtacaagaggcagaatttggtcccggaggagaaacctaacaaggacaggatagggctattcttctgggggtctcactccaagcctgtacactagtagagccaagtaactgttggatatccccactttagggcctccatctgtacatgaaagtctgcagggctctaaggtcaggttcatcatctctgttcccagcactgctcccacccagggttatctacctaatccagggttccattatccaaccggatacccagattagaaaccgagagtcatccttggttctttccactcctcaaccccccacatctggttgatcatctgaccttgcctcctgtcacacctaaatgttctcagattcatctcctgctgctgtcccagtgaggccccccgcaatcctttcgcatctgggcagttccaaactagaattcttgcctgccctgcctcccatggaatgcccttaccctactgccaatgtgatctttctgaaacagcatacctgatattgtcattcccaggagcagcttcccacctccctcaggatttaaactttaaactctacagctctccacactcacctcaacaatgagctcctctcatcatttcttctcctttgtcccagtcacaggccacttttgggccatgccaaaccactttagtttctgaagcttctgcccttgacctgttgctcccttgactggggcctaagatgactgcagtcatgcagggccagggcaagtggctcctggctgcatttcctcctctgtatcacgggactagcatttggcagagagcaaagcagaagatgacatctggcacacacagggagtgaacaagtgttcattcctcaccttgaagggtaaaccttctcagaactttccgtgctccctctggttcttatttctgtttttgttttttgtttttttccagaaaaaatcaaatcagactgtaggtaaaatagggtgtccagagaaggggactgttttctaaattatgaaaacaagtaacaacagagggacatctgtgtcaatatggctcagcatataaagaacccaatttttgctgtattgcttttaaactactctatagacaacatacaaatatatatttagagagctaactgaaaacagtttattagagcatttattgaaatgtcatggtggctcacacctgtaatcccagtactttgggataccaaggcagatggatcaggaattcgagaccagcctagccaacatggtgaaacaccatctctactaaaaatagaaaaattagctgggcatggtggtgcaggcctataatccagctacttgagaggctgaggcaggagaatcacttgaacccaggaggtggaggttgcagtgagccaagatcatgctattgcattgcagcctgggtgacagagcaagactctcgtctcaaaaaaaaaaaaacatttattgaaatgtaattcacataccatactatttgcgcacttaaaatttaaattattgaattttaatttaaatcaatttaaataaatttgcaaggctgatttattagctatacatctcaagagtctgtagggtatttccaaaaatgatcttatactgggacataatgtgttgaacttctaaacttcataggctatattttctaaccacaacacaacaaaatagaataactaatggttaaatttaaaatatcagctacaacaaatgagaaaatattctgaataatttgggaatcaacaaagaaataaaaccaaaaatgacattagttagaaaataacaaaaatgagaagcttatctgtcaaaacctatagaatgaagccaattatatagttaaaggtttatgttttaaatgccttaattacttttaaaagggaagaaaaaaaacatgggaaaagcaaaatgataatccagtgtggctcttggaaataaccaagaaaataggtgaagttctagccaaactagttaagatataaagacacaaaaatatacaaatttacagcagaaaatagaagtactgcacacatatgtactaaatcaaaagctttaaaatagttttaatggaatgttttaaattaaattgatgtaagaagtaaaaaaacaaaaaaaaaaaacaaaagaggccaataacatggaagtaattttagtaatttttaaattattatttaatttcttcaaaagttggctcctgacccagatggacaggtgaattctttagccctttaaggaatttttccatgttacataaaacttttcagagtcttgaaaaagatggaaaacttccagatcattttgtcaaactcacaaaactctgacatcaacctgacaaagatagcactaaaagggggaagaaaactaaatcaattcccagttaatgtaagtggtgcctattttaaattttatttaaaattgtttctctcctttattaatattagtttatgctggtctaagtcaatatctcagactaaggacttttttggtgatgggtctagagaaagactggctgaggaggtgactcctatctgttgagaacacctgtattttggtaagtccttaacttgtgtgagactaacaaatatgcagaaatataactgtttcagggtggagataggaaaactagatttgctcacgtagtatgcttttcttagaaatctgaaatattcttacctgaaagtaataggggagaaagaaaactatacagaaggcttccttgccttcagtgtcataccccagtttttaaaagctctcttgttttcaggaaactttagatccaattgatgaggtcgctgcactcatcgcagccaccattcatgatgtggatcaccctgggagaaccaactccttcctgtgtaatgctggaagtgagctggccattttgtacaatgacactgctgtgctggagagccaccatgcggccttggccttccagctgaccactggagatgataaatgcaatatatttaaaaacatggagaggtaagaacaatgattgggaagtgtgttgatccctctctttcttttttaaacagctatattgagatataattcacatcttatacagttcacccatttaaagtgcacaaagtatacagtgggccggacatagtggctcatgcctataatcccagcactttgggaggctgagacaggagaaatcacttgagcccaggagtttgagaccagcctgggcaacgtagggagaccctgtctctacaaaaggaaaaaaaaaattagccaggctcggtggttgtgtctgtagtcccagctactcgggaggctaaggtgggaggattgcttgagcccaggaggctgaggctgcggctgcagtgaaccgtgatcacaccactgcactccagcttgagcaacagagccttccctgatctctcatgctaagttaaaccctctaattattcaatcccagatttcttcatagcacgtatcacatttcttatttaataattactttttaattatttgcgtaatgtctgattagattcttaagctctgtaaggtcacaagggtcatatgtcactgtgccctcggtgccctcagtgccacagtgcttggtacatactagagcgagaccctgtctcaaaataataataacatgtacagtggtttttagtatattcatagtggttttagtatattcatagagttgtgcaactcatagtatattcaattttagaatattaccccttcgatagaacctcaaatttatgagcagttcctttccattccccctcaactcccctagtcctagacaactactgtgatctactttctgtctctatagatttgccatttctggacattttatgtaaatggaatcatacacaatatgtgatcttttgtaactagcttttttcacttagcacaatgtttttaagattcagccgctttgtgtctggatgtttcaaggtgaagtataatgctgatatcttgagctcttagagactcaaagaagcagtcatctatctctctccctgaagcactccactctgccctcctgtgctcagcatacatctccttggcattgtctctgtttacatgtcacttccttggggaagccttccctgatctctcatgctaagtttaaccctctaattattcaatcccagatttcttcgtagcacgtatcacatttcttatttaataattatttttaatgatttgtgtaatgtctgattagattcttaagctctgtaaggtcacaagggtcatatgtcactgtgtcctcagtgccacagtgcttggtacatactaggaacttagtgaatatcagttgaagaaagaaaaaacattgtgtcatgaagaatacttattaatatggatttttaaagaagaggatttttgattttgtaaaactcctttctgccatgttctaggatttcagaggtggagttaaagtagtttctattcatatttgcttatagttacatcagttatcaatggaaaactacatgagaccctattaactttccagagaaagttttctactcaactgcagaaaagggattgaatagagactttgtttcatattcataccccttcaaattttgaattacatggattaccccttcaagaaatgaattttttaaagtactaaaataaaagcaagggttagaggtggaggtatcaagtactccctatgatttcgcagctttcagaagatcggtcctcacattctatgggcactaaaatggttgggcctcaagacacctccatgtggggtatattctttctaaccacagatttctatcttcattgacaagataaacactgcaactataagttttgcctatagcttttggttttaacttcttttgaggttctccttgctaacgatctaggcactaacccctaacttccatgtctttttaaaatgtgccttgtggctttcagtggcattagatttatagctgcagaggacacatacctggataacagattgttttcaggagtacctgtctggtctggatcagtaatttgtagcagcctctaatttgtcatcgaaaacaggaatgattatcggacactgcgccaggggattatcgacatggtcttagccacagaaatgacaaagcactttgagcatgtcaacaaatttgtcaacagcatcaacaaacccttggcaacactagaagaaaatggggtaagggaaacttattgcaaagagaacctgtgtttggggtccttgtactgttgtgttatggagacacatgggctatgatatcagccacagaagggttccctcagtgagtctattagactcttacagggacagaactaatgggatacacacacacacacacacacacacacacacacacacacacacacacacaaaggggagtttattaagtaataacttacacgatcacaaggtcccacaataggctgtctgcaagctgaggagcaaggagagccagtctgagtcccaaaactggagaacttggagtctgatgttcaagggcagagagcatccagcatgggagaaatgtaggctgggaggctaggtccatctctccttttcatgtttttctgcctgctttatatttgatggcaattgatttgattgtgcccaccagattaagggtggatctgccttccccagcccactgactcaaatgttaatctcttttggcaacactctcacagaaacacccaggatcaatactttgtattcttcaatccaatcaagttgacactcagtattaaccatcacagtgggctcactgaatttagtttttattggttaaaaaattatttaaagtgcaaaaacttggcaggaaaaaaattagcacatccaactagatgggaaaactcgaaaggaaggtcagattttagataagctaactttagacagactattcctgcacccttcctcactaatatccccctcccttcttctccattctgtgatcagttggagcccttgatatatctttctagccactcccactgggcacatatcatggtagcagcagctatcctctcttggtcctcacttagaggagcatgtggattgagaaagacactgtatttgtgtcacaagggtgacattattgttgcccctgtttctacatttgaggcatggagtccacaacaactgctgggcaaggataacattaaccctctcaccaggcaggagtctccagctgaggaagcatacaggcccaagttcccatcatttgcttatctgtagaatggggataagaagtctcaaggcataggactgatgagcatggtacatggtaggcacttaagaactggtgcctattatactagattcattgtgtcatcagcaacttaaagaatatgttctttcatgaacctcttcctttgaggcccacatttactgaacatgttggcagcagctcacagtcttctctcccaccctcctccccagctcctatcaccatcctgagatatttgccacacacagggatgacttatcctcgcaggctaggatcataattccttgacttctaactccattttacttctgcaattcatttgtttggccatggcctttgtctgccccctggttttctagcatattaccccatgacacttactttggtttaacctgatgttgagaactgtttcttcaccctttcctgttctctcaatttgtcagcctgcccctgacttcactctctttccaaagacttttaacagaggtgcctgtaccagcctgttttattggctcctgccctgccattctggatagggctcattgtcacctggccaccactcctggctgacctcatgccacagaaggaaaccatacacccagcagacttggtttcctctgtctagtctggacagcccctagagctgagttctctgctccacttaacattatggttctcatctctgttgtcggtacatggggttacttctgagagactgaaaatcaatatccagtgggtcagagcaggagaaaggaagatgaaagagaatagtttccaggctggcagtatgaaactatagtcacactgcaggtattaacggatctgaagaaagaagggtcagcacagagctggtcacagtggaaacctggagtgaggagagctactgaagtgtcaccggtgtagtattcattttggcactctccaggaagtgtgggaagcctagagtcaggatgccacccgtccatcttgatggcagtctgttccctctgagctgggaccatcagggcttcttaggctactgctattgcatattgaaatatatgactaactcctttggaatgttgcttgatgggcacagaatcagactgaggagacctgcttgcctttagtctttttcattgctctctgccccaataccctctaacctgaattctcttcagagagcctacaaatagtggttctattacatcataaattgatccatatccagtggggatccttggatgcagacagcatgtggtactgtgagtggaaggcatgctgggactaaaggcagaactgaagttcttatcctggctcggctggttgctttggacaagtcacttcacctccctgagtctcagtgtcctcatttgtaaaatgtaataaataatacttttcatgcttaccattagatcttcttgtgagtgcagatcaacagagaatgactgttaagtcctttatccatcaaatatgttaggtgttatcttgggaatctgccctatcacaggactgggttgagaagtacggaggctgttgggctgcaagagcccatttgttgtgagggcagagaaatttatttttttcagctcatactcttttttaataaatataataaaagacaaaaccagtctttgagttcttaccaagggggagagagagagtggaacagaaaaaaaggcaactgtgagaaagatttagtgagaggaagagaagaaagaggcaaggaaaaggggaagggcagatataccaacccctagtgctaccctccacttctaggtcctgttgcaatctcactgagcctcggttttctcctgggtaaaatgagaggccaagctcaatgctcacagtatccttggcactgttttgtgagatccttatagatcctgactagtgctctttttatgcttacagtgggacagaccagtaagagagggcttggcaccaagggatccattttgattgctttgaattccactcatgtttcaggaaactgataaaaaccaggaagtgataaacactatgcttaggactccagagaaccggaccctaatcaaacgaatgctgattaaatgtgctgatgtgtccaatccctgccgacccctgcagtactgcatcgagtgggctgcacgcatttcggaagaatatttttctcaggtaagttgctgcctcttttaagtttctagagagagagagagttaaaacccataaaatcatacgagataatggacttaacactaggaaatagggttctaaaaaaattctgtccttgttttgcaaggtaacaaatggtaactggtaacaaattttttttttcttaagaatattttattttccctttattcttgcaggatatttttgttagatatagcatcctgggttgatgatttttttcctgaaagtacttttaaggagtcatctggtcttcatattctttctgagtagaaaaaacctctcttggggcagaaaaaaatattaggaaatatactggctaagatttttccagatttggtggagggcatatgcacatgcatatgcatacagattcaagaagcccagtgaaccttagcccatgtcagatgtgtcatagtcaagcagctaacaggctaaagataaatcttgcaatcagccagaggaaaagcgacacattacttataagaaaacagtgattctcatgtcctctgacttcccatcaaaaactatgaaggccagaagacacgggaacatctttaaagtgctgttagctttgggaggatcacttgagcccaggagtcttaagagcagcctgggcaacatggtgagaccttgtctctacaaaaaaattaaaagttagccgggcatagtgatgcactcctgtagtcccaagctacttgggaggctgaggcaggaggatcgcttgaagcccaggaggttgaggctgcagtgagccatgatcatgtcactgcactccaacctgagcgacaaagtgagaccctgtctcaaagaaaacatacagctaacattatatttaatggcatgagatattgaatacattcttaagattggaaacaaggtaagggtgcccattcttacctcttctgttcaaccttgtattggtgttcctcatcattgcaatagacaaaggagagagaggtttaaagaacaaaaagtaagacatacatttgcttctgtttgcagatgacatgattttatgcagaaaattctaaggaatatacaaacaattattagcactaataagtggatttgatttaccaatgtcataggacacagctcaatatacaaaagtgagttgtattttatgtactagcaaccaacaattggaaaatgaaaccaaaagcccagtcccatttacagtaggaaataaaatttaaaaattaaaattaggaaaaaatttaataagagatgaccagaactttacagtgaaaaccataaaacattgctgaaaattttaatgaacacttgaataaatggtgaggcatatcatgttcacatactggaaggctcagtgttaacattcacttctacccaaattggtgtttcaattcaaaaatttcagcaggttttttttctgtggaagtctacagactgtttctaaattatatatgaaaatgagaaggaccttgaataagcaaagcaaactttaaaaagttggaagatatgccctgtttggcttcaaaacttaaaataatcaagaaagtgtggtgctggcataaagataacaagtacaaccatgggacagaatagaaatccaagaaacagatcacatttatatgatcagtggctaatgtgaaatttttgcagtaagtggtgttaggataattggatattcctatgcaaaaaaaaaaaaaaaaaaaaagaaccacaactcctatctcataccatagagaaattcatagacctacatacaacagctaaaaccataaagcttttagagagaaacataccagaatatcctcaatgacttgaaagtggacaaagatttcttagatgcagaaagcaacaaccagccaggtgcagtggcttatacatgtcatctcagcactttgggaggccaaggtgggaggattacttgagtccaggagttcaagaccagcctcagcaagataatgagaccgcatcactagaaaaaaaaatttttttaattagttgcctgtggtggtggcacgtgcctgtggtcccagttgcaggaggattgcttgagcctcagaggttgaggctgcagtgagccatgattgtacactgcactccaacctgggtgacagagcaagactgtgtcttaataaaaagaaaagagcaacaaccataagaagaaaatttgataaattagacttcttcaaaatttacaaagtttgctcattcaaaacacagctaagaaaatgagcaggcaagccatactggaggaaaatatttacaaattatatttgaaaggactgtatccatagatatataaagaactataactcagtagtaaaagataaaccacccaatttattataggcaagtatttgtccagacacttccccaaagaagctattatgaaaagccaataagcacatgaaaaaagtgctgaacatcattagtcatctgggaaattcaaattaaaaccacagtgaaataccactacacacccaatgggatggctaaaaatgggaaaggctgacaacaccaaatgttgaagatgtggagcaactagaatgcatgcatttgtgatagatgtgtagaatgctacagtcactttgggaagcagtttagcagtttcttttttcttccttttttatggtaaaatttaccattttagatctgggttttcttcccttcattctcttcatatggtatatcacactgatcttcatgtgcggaaccaatcttgcatttcagaaatagattccacatagtcattgtgtataatcctttaatatgctgctgagtttggattgctagtattttattaaggatttgtgcatcagtatttacaggggatattggcctgcaattttcttgtagtgtctttgtctggctttattaggataatgctggcctcatggaatgagttaggaagtacttccttccttttcagtttttctggaagagtttgagaaggattgatattaattcttctcaaaatgtttggtagaatttaaccagtgaaaccatcctttcttgggaggtttttgattactgattcaatctccttgctagtcattggtctattcagattctgtttctttatgattcagtcctggtaggttgcatgtttctaggagtttatccattgtgttggcattcagttgttcatggtactctcttataatcctttttatttctatgaaacctggagtaatgttcccactttcattctgattttggtaatttgggtcttgtctttttttcttagtccatctagccaaagatttgtcaatcttgttgatcttttcaaaaaattatcttttggttttgtttttttctgttctctatatacctctgttctttattatttccttccttttgctagcgttaggtttagtttattctttctgtagctccataacatgttaagttaggttgttgatttaaaatcttgtaggcatttacagctgttaatttcccccttatcactgtttttgctgcatctaataacttttggcatagtgtgcttcattttcatttgtctcaaagtattttctaatttcccttatgatttcttctttgaccccttggttgtttaagcgtatattagtccatttgcattgctataaaagaatacctgaggctgggtaatttataaagaaaagtttattttggctcatggttctgcaggctgtgcaagcatagaactaacatctgctcagcttccggtgagggctcaggaagcttatgatcagagcaaaggaagggggaagcagatgtatcacatggcaggagagcagggggaattgccacacttttaaccagattacctgtaaactcagagcaagatctctcattaccatggggaggccactaagccattcacgaaggatctgcccccatgacccaaacacatcccaccagaccccacctccagcactggggattatttttcaacatgtgatttggaggggacagacattcaaaccatatcaaagcatatgctatttaatttccagatacttgtgagtttcccggttttccttccattactgagttttggttcatttcactgttattagaaaaggtactttgtatgaccttaccttttaaaatatatactgtttgttttgtggcctatcatatgttgtatcctggagaatgttccatttgcacttgagaaaaaaatgtatactctactgttgttgggtggatgttctatacattctgttaggtccagttggcctagagcattgttcaaactctattgtctcattgttctattcattataaaaatgtagtattgaagtctccagccattattttagaagtatctgtttcttccttcagttctataaatgtttgcttcatatattttggaactctggtatttgatgcttatatgcttataatcattatatcttcctgatgaattgacccttttattaatgtccttccaggctggagtgcagtggcacaatcttggctcactgcaacctctgcctcccaggttcaagcaattctcctgcctcagcctcctgagtagctgggattataggcacgtaccaccatgcctggctaatttttgtgtttttagtagagacggggtttcatgttggtcaggctggtctctaactcctgacctcaggtgatccgctcacctcaacctcccaaagtgctgagattacaggcctgagccaccgcgcctggcctgtaacagtttttgacataaagtttattttgtcttttaggatacccaccccagctctctcttggatattattttcatgagatatctttttccatcctttcattttcaacatatgtatgtcttgagagctaaagtgattttcttgtagatagaatgtagttggatcatgttttcttatccattctgacagtctgtggcttttgagttgaatctatttacacttaaaataattactgatagggaaagacttttgccactttgttagtttcctgtatgtcttacagcttttttgtccctcttcctccattactgcctcctgttgtgcttatttgatattttgtaatggcacattttgattccctttttctatagatagttgcattgtggataccatagagattgcataggacaacctaaagttacaacagttggttttgatgtcaacttaacattaattgcatacatgaactcttatatagctctaccaccccactccattttgtaaatgtcacaagtaatatctttatacattatatgtccattaacatttaaaattatttttatgcatttttaaaagtaaagttacaaaacaaaattgtaataatgctgctttttatattttcccatgtatttaccattatcagagatctttatatcaagttactgtctagcttccttttatttcaacctaaaggatttcctttagcattttttgtaggtcaggtctaatggtaatgaattcccttggcttatgtttatctaggaatgtcttaattcctcttttttgcaggacagtttgcctgaatcagaattttcagttgacagttttttatcttttagcacttcatatatataatttcactgccttctggccttcaaggtttctgctgagaaatgagcagatcatcttattatctcctatatgtgatgagtcttttcttttgctgctttcgagatcctctgtcttttgactgtttggttatagtgtgtctcagatagatctctttgggtttatcctacttggagtttatttagcttcttggatttgtagattcatatctttccccagattatggcattttttggccaagattttttcaaatatggggtctcactatgttgcccaagctggtcttgaactcctgggttcaagaaaccctcctgccttagcctctcaagtagctgaggttacaaatactgtgcctgttggctattatttcttcaaataatctctgtccttctcttctcctcttctttttgctgaactcataagatgtgtattggtccatttgatggtttcccataaattcattaggttctattcacttttcttcattcttttttctttcttctgtctgcccatatctgatactgaacccctctggtgaagtttaatttgttttttgtatttttcagccttcaaatttgagatggagtttttgctctgtcgcccaagctggagtgcaatggtgccatcttggctcactgcaacctctgcctcttgggtttaagtgattctcctgcctcagcctcccaagtagctgggattacaggtgcccgccaccatgcccagctaatttttgtatttttagtagagatgaggtttcgccaggctggtctcaaactcttgacctcaggtgatccacccacctcagcttcccaaaatgctaggattacaggtgtgaaccaccgcacctggcttgttaggttacttttcataatttctctctttgctgatattctcactgtggtgttcacctgtcatttcctatagttcctggtctgtgtgtgtgtgtgtgtgtgtgtttttaggtctttgagcatatttaagacagttgttttcaagtctttgtccagtgcctgtacatctttagggacagtttcttttcttcctttgagtgtaccatattttctagtttctttgtatgccttgtgatttttgttgaaaattaggcattttaaaaaacagccacctctcctagtctttgaaaactgtctctcagccttacaattaacccatcatgaaagtttaaagttttctcaaacattttctgagcatgtcttgtctgggtctgcatatacatactcttcttaattcccctatatacacagctgctttcagatgtcttaatttcctgaagtgtcttgtctgaggttatcctcagggccttagatgatctgttgttggtctccgctcataatctcttgtcttcaggcatccatattggtcatccccctgcagctttcctgagcagtagtcattgcttttctacctgggagctaagtgaaacagagaccaatccttcaggcagcccacagacttgtcagaatgttgcaaataaggtctgctctgctccctccggttcaagggacacagctggaaactgggccgctgcctcctccagaccaagattgtaccacactggggaagtgtggtgcaaggttgagtgaaaatacccttaagtttcctgctgttttgaatgtggcttttcttgagtgggcattcacttggttgctgtagacttttgactgttttccagagttcctgtaaggttattttagccagtctctcatttcatggagaaatgaggacttggagcttcctagtcccccatattactgatgttactccggtgctcaggctttgattttaaagtcattaagacattaagatacagttgcttcttgtattcagtggggttaggtttgcaagttcaccccttatagccaccctgtctcttgaatagcatggatactaagagtgccagggcctgaagcaaggtgaagaggcatctctggtttgtctctggctggggctgcttgacttcatggggagtggggcttgagtaccacttgcctggctctgtgccaggtgttgtacagtcttttattttcgcttggggcacagcggtgaaatgtgaaacttgtagaccctgccttgcaggtggggtcacagaaaggaagcatctacaggtgtggagttctcactggtgacttagatgagggcatgggccacagtttgctggtctccaggagggaacgggggcccctggacgttccatgcacttgtcacattgggccaaagagaagaaatctaagcacgagggtcttcactgaccttcagccagccagctgcttacatgtgaatagggagggcaggccctgagagcagaaagacagaacagcctctggatgactgagtggctgagctaacggagcctttgccatggctgcccagagagagctggcttagggtctagcgtgaccaagggagggcacatcaggagagcgccccgcccagggcactgctgtttgagctggacaggcccatggggtgtgaacccaaggccctccctgcgcccccaccccttcctctctataccatggcagagactcgtgtagggctgactgcttttcttagacagcagtggggctgccaacagcagggccttcaccacagccagcggatgctgggccagcgttccccactcctcttaccaaagcacgtgaatcccatatgctgaaccaccagaacagcaggaactcttctgacttttgctcagtcccacagtctagcactgttcacctgactttcttggcacttgtccccagcaccgtcaacacttacctagcatacacgcacctctgggcactgtgctaggtatggtgccatcctaggaaaacctccagaggttcgcctgcttctctcaagtagagagcccatatggagagccggagtgagttgttgtgcacagggcaaggtgcagaaatacttggtagagccaggcctctgggtgtcactctgggagagcctgaggtgctgggccaggtgtagtaaggaagatgggagaagggtgactgagtgcacagaaaaaaggcaatggagtcagcgactttagggagctccacgcaagtgccggagctggtgccgtagagctgcggtggggggagagagatgctgggacgagagaactttctgacctggcatcccctggagggcctgtgagtgcaagcatgggaacgttctgggcgaggtgctgcagccatggtgaggccctgtggagcaagggctaaggggaggagctgcgagtgagttctgccagctaccagagcctggctgtgatggggtgagctctgctggccatttgggagctggaagttcggctgtgagtgtagaagacacgtcttgtgagtggccaacagtgggacgagacttcagtggttagcaagtggttagcctttcttctgtgcactcagctacccttctcccttaccacacctggcccaacacctcctcaggccctcccagagtgacccccagagggctggctctaccccctccagccctggcactggggagaaaggctagtgttcaatacaacagccaccatcccttcacccggccccacacatgtactagggtcccatctagaagagctgctccccccagcccactcctacctcactccatctgcgctcaccctgttctcatcctgccccactgtttgacttgactcccagcacaggcgccctggcacagcagggatcttgcagcgattccggttgcacatccacaggggcttctaaagaatgcactcaggacttctggcctcattcccaccccatggaccttacctcacccttttctccagcaccattgggccaaaatgagaccttatcaaagaaagaacaggacgcttgcctttttcctcaggttcttaattatgtttttagttttttgcgagtctctctgaaatcctgaagatgtggaagagtttgactaaagtacataaatactcagagctctttttttttttaaacatccaggatctcaagggtgttcagaaccttttcaaaaaaataatttagccatagatgagaagcagccactaggcccttccttgtaaagtggcccctgtgtggggatgcttcaagccaggtggaaggacggctggactgtgataggagtgagaaaagaacagatctttttctttgagggatgtgagcccccttagttgtcagacccagagaggcattgaaatgtgacagcagttacgtctcactccccaccctgacctaagtaatcgcctgctctgtggactctaggccagtagcctgtaaactctgtatattaattttgcctcagtttctttaggtcaatacgaacaacagagcggtggctgactacacataatgtttgggatcttacctgaagagcttctgcaaggaggcttccagatgtttaaagtttggcttgagttggggtgtcctcagaccccactgacatggagtagtcctcattctgagaacttggtatctgttatgagacatggtttggctgcgtgaggtggtgattggcttctcaccatgacaagccaccttaggctgccaggagaagctcttcctgggggaggggctgcccctaggtggagtggaaccagatgttggggtctcctgatcacattttctgctttacagactgatgaagagaagcagcagggcttacctgtggtgatgccagtgtttgacagaaatacctgcagcatccccaaatcccaaatctctttcattgattacttcatcacagacatgtttgatgcttgggatggtaagaaatcttccttaaaatagcatattttcctctaaataatggggaaccgcgtatgaaagagcagagtgcatttgactgtagaatatgatttggggcctgggctttcaagaacaagagcgaagtgaaccatcaccgagggcccctgagggctaggtgttctttcttaacactccccgcaggcataggtgtctttatgcctgttttatagatgacgggattgaacttggggccccacagcttgtagtagagcagctagggttcaaaaccaatcgtgctggctccaaaacccatggtgtttctacagcagccctttgccctccactgtcccctgcttctcccagcctcactctacacaagaccagaaggactggtctgtctctgactgatgcatgtcaccctcctttaacttcaggtggggcacaggagtctgtcaaataaaagaatatcggagaactgatattccacgtgcatcttcgtcctgagggctgcaccttgaaggaggggctacagggctgataaatgtccagatccagtcaggaaataaacccatgtctcaagaaggccgtagaacaggggtaggcggctggggagaaggactgaagcagtggagctagatagctgcagctttgggggacactgcatactctgcagctcactgcttctgggactgagaccagacgcgtgtgtccccaggctgcacgttcttcatgtggtgcaggtgaaaggagatgctggtgtatgtgaagcatgcgtgaagggacagtgagcacacaagggccaggccatcggttggggcgggggggcaggggcacactacatactgctttctgacaccccaggcccaaaggtgctgctggtttaatggtaattaagcagattagccaccttctgttttatttaccacagttaccagctcagcaggtggtcacagaggaggtgctggcattgaggacagggtttaacttcagtcagccacggctcgttgaagctgctgggtgtgtttgcccgggtctgtttagcctcacgcagatgcctgctcccatctgtcactctttaaaatgctcttagtgaaagcctaaaatgtaaacagaggctgtgaaagcatatcacattcctatctttctctccagcctttgtagacctgcctgatttaatgcagcatcttgacaacaactttaaatactggaaaggactggacgaaatgaagctgcggaacctccgaccacctcctgaatagtgggagacaccacccagagccctgaagctttgttccttcggtcatttggaattcctgagggcagccagagctccttggtcctttcagtactaggcagaacagcccccgatctgcatagcctgtgaaagcccacggggacatcagtaaccttctgcagccaccatccaatgccattactgtcaagtgagacttggccactgtagcctgggcctgctgcaggagctcttcagaaaggcacatgaggaccacggtttgcctcagtttctggtaaaacacaaggtctggagtgcccctgcaaagggtattgatggacttcctgccagtgacagagcatgtctattgcaaacaattctctcagttacgttcagcacttaagaacggctaatggcaataggatctttagcaactttttcacatcatagaaggtgcaatcgctcacttgggaacactactgagagtgacttctcttttaaaattgagtagcagatgaaaaattaaaatttgaacttgattattaatatcaattaaaatgttttatttattttattaaaagctcaatattttctatgaattcaaaaatacttcagagccaaagccaacttcaaataccgtgaccaaatttacatgattcatattcattatgcattacttggtatacagacttattttcataatgcaaattaataaaatgacacttttactgcactatagaaatattcatgtatgttaaacttttctgattgaggctaactggaaaaagctggggtcgtattctaagtgctaaagaaggctgcttctactgtatagaacccagggctctgaaacagctctagccgcctaatgcacttcacaggtaactccccaaggtaaaactagactctcttgttggttcgcaaagaaaagttaggacttaacacttttttctaaaattttataattcaatttccaaaagtctactctattttatactgtttctacaaaatattccttataaaaacaaagaacaaaaattgaatatttaatgaattgacattttataaccaacctgtttttatctacggtgggaatctttgatgccagaaatttataaagaggttctgtatcttcacaccttgaataagcataataccataaaaaatgacacttgacatgtcaatgtatttgtcatttcattttaaactcgtatttgtggtttttttcccagataaaaatgaaattaaaccatttctttttaagaaa

SEQ ID NO: 478 - DNA, 5157 bp, Homo sapiens
  source 1..5157: mol_type = genomic DNA; note = NC_000011.10:72216794-72221950 FOLR2 [organism=Homo sapiens] [GeneID=2350] [chromosome=11]
agagcgcgttgtctaccctgtaccgaagacagaggctgtggggacagcctaggggcctggatctattgcctacttagagagaggccaactcagacacagccgtgtatgctcccagcagcaacggaggttcaggcaagatgcccgaaggagggaagggtgacaagggcagtggggagacttggagagtttgtgcagaggggaggaacacacctttctttctgtattgtattgtattgtattgtattttttgagacagagtctcgctctgtcacccaggctggagtgcagtggcacgatcttggctcactgcaacctctgcctcctgggttcaagtgattctcctgcctcagcctcctgagtagctgggattacaggtgcccaccacctcgcctggctaatttttgtatttttagtagagacggggtttcatcatgttggtcaggctggtctcgaactcttgacctcaggatccacccacctcggcctcccaaagtgctgggattacaggcgtgagccactgtgcccggccacatctttctttagaaagatcatgctggctcctgtggggaaggcaacttgaaggggaagaaattggaagagggaagacttgacactaaacatagagccatggtcagtaagtttttggagggacctttaccagagagggagaggaagcagtatccattatccactctttagtgacagagcccaaaggaacagctctgtaatggctgggggtgggggcaagggcagcaatgaacagaggaggcgagggctgctcctgttgttgagtgccttccaggacactaagtgctggtctggctgctccaacatgggaaactttcatgttgtctctcagatctaagggtctctctgcatttttaaaaaaattattttgaattttttaaacttctatcgtttttcaggtggttttggttgcatagataagttctttagtggtgatttctgaattttagtgcaccagtcaccggagcagtgtacactgtactcagtatatagtcttttattcctcaccccctcctcaccttgccccacccccagtctatatcattctcatctgcatttgttttttgagaggtagggtgaggtctgctgcattagcccagagacagctgaggaggctggaaaggaaaatggctttcagagaatagggaaggaaaaagtctgaggaagcaaaactacttaaaaaacactgctctttccatttccgtatcatttaaccaaacaccatcctgtgggttctgtcacttgatcctcatgctgatctgagaactcggcagagctgggtcactgccttccccaaggctaacctggtttctaagctggcacaagaccccaggtgatctatcatctaaccacagagcccttgctggacagagggtgaagacattatgtgtccctggctctgttcagggaagcagaggatagacctgaagaatttaattacttgtcatagataaagcctagagaaaaggtgagggcgcaaagtatctcctccaaattgggaagactcccccagggctcactcactaacgccagttctcctgagcctttaaagcctgggggtgagggagccctcctggtcaaccctctctaccctagcctcagggagcttcagggccccagcattgaaggaacagggtctgacctcatttgccaccgtagggttggggagactgaggcaggaggtgaatgggctcccagcttggagccctttcccctcaggacttggtttccctaccctagctccgcctgcagggacagaaagacatggtctggaaatggatgccacttctgctgcttctggtctgtgtagccaccatgtgcagtgcccaggacaggactgatctcctcaatgtctgtatggatgccaagcaccacaagacaaagccaggtcctgaggacaagctgcatgaccaagtacggctggagtgtgcctctgctaaggagggggcttgttctaacagggaggagaaagtcaggatggtgggagagggattgaggggtcagatacctccacatcctgaagttttcctgtgggagaagatgaaggtggagtaggaagagtggctgaggtgattttaggggggccctccccggaggtggataccatgttgacaatgatattgagtcgtcattcgatgggcacctgtcagttgtcatgtgttttttgtacaaaatttcatattcccaggggttcttggatgtaggtagatgatattctccacattacacaagtaagtgaaaatgaggctcacagaagcacatgggcccacacaggagctggacatgaatggcccctgtggaggggtaggaataggagtgggttaggctcctcctttggtgggtgacagactagggagtcgctggcttttcccaccctcactaagtgccatttccatggagtgccaagggagaagaggaggaggcccttctggctgtaatttgaggcacaggggctggacattcacacagtctatatacatgtatgccaggggattgcagccttattagactcaatgtctcccttttatgacagatttttttttagattctcttttctatcctgcaatgaaattcaaagaacctatttgtatgcataatttttgcaaatatcaacataatgctctgtaatataaaggagaaacacacagaaagtaacttgtaataaaataatatatatttcaatatgtcagttctctggtatgactacattagaaggcattaggaaatagcacatgcttgcttttgtcataaaatcattataagtggggagctacaaatgaagattgatacaggtatattctattggtgacttaaacactataagatactataatataagcaatgttgctgttgatgtcatacttttctaaaatagtgaataattctagtagaataaaccacatagtacagccttctatttcatggtatttgcagtcctggaaaacccagtctagattaaaatcttgtgaaaacatgatgtgcctatatgtaagatagagatacatttaaaaagtagggcttttgcttacttttttttttttttttgagaaggagtctcactctgttgcccaggctggagtgcaatggtgtgatctcagctcacggcaacctccgcctccggggttctggtgattctcctgcctcagcctcccaagtagctggggcacccgccaccatgcctggctaatttttttgtatttttaccagagacgaggtttcaccatgttggccagggtggtctcaaactcctgacctcaggtggtagacctgcctcggcctcccaaagtgctggggttacagctacgagccaccacgcccagcctggcttttgcttactttttccagcaaatattttcatgggcctactatgtgtctggcactggcctagccactggggacacagatcttactacatgccaagaagaataaatatattcaaactccattactccatggctcgctccctctcttcctttgctcaaaatgtcaccaatgtggcatttcctaacctatttaaaatttcagcaattccacattaccatttcctgctcatatcatttaacttttcccatatcatttatcatatcctgacataccatatatatatattttttaagtttcttactgtctgtctcctctgaccagaatgaaaattccatgaatacatatttctgtctgttttgttctcttctgtattcccagcatctataaccgtgactggcataaagtaggtgctcaataatttttaaatgagtaagtgaaaggactttttatgaagtgttacatacctcataaatgataactattattcccaagacagggtttcccctgggctcccacagtcccctgatcacacggttgtaattgtgtttcctccaagaaaggggttcctggaggcctaggagagagggaccatcatctgggaacctgagtgttctcaggacaacctgcctagggcagaggagtaagaaccaaatgggggagagacacgaggtggcaggaggaggagggtatggggaggcacttagtcctgtgtcttccccacccagtgcagtccctggaagaagaatgcctgctgcacagccagcaccagccaggagctgcacaaggacacctcccgcctgtacaactttaactgggaccactgcggcaagatggagcccgcctgcaagcgccacttcatccaggacacctgtctctatgagtgctcacccaacctggggccctggatccagcaggtagggtgtctcccccccacccaccccagcagactgccatccccctcagtcacttcaaggcgatggctgccagcatccctggctgagaggagccctgcctccccacctcccacccaggtgaatcagagctggcgcaaagaacgcttcctggatgtgcccttatgcaaagaggactgtcagcgctggtgggaggattgtcacacctcccacacgtgcaagagcaactggcacagaggatgggactggacctcaggtgagggtgattgagttggggttaggaaaaaggagattgaggtagggtttggaaaatcttcaaggatttggggtggggtgaagatttctgggggtggccagaaatgagctttgggcccaggggctgaaagtctgtgtccaccatgcctctccctgcaggagttaacaagtgcccagctggggctctctgccgcacctttgagtcctacttccccactccagctgccctttgtgaaggcctctggagtcactcatacaaggtcagcaactacagccgagggagcggccgctgcatccagatgtggtttgattcagcccagggcaaccccaacgaggaagtggcgaggttctatgctgcagccatgcatgtgaatgctggtgagatgcttcatgggactgggggtctcctgctcagtctggccctgatgctgcaactctggctccttggctgagttcagtcctcccagactacctgccctcagcttggataaccaggctgggctcagctcagctcccacaaatgacagccccttaagcatgcttctattagtcacctaaccctctgtcacccagtctgttgctgctccatggtggggccaagagtcacttctaataaacagactgttttctaataattcca
